(19) United States
(12) Patent Application Publication
(10) Pub. No.: US 2023/0192821 A1
(43) Pub. Date: Jun. 22, 2023

(54) POLYPEPTIDES ENCODING ANTIBODIES BINDING TO SARS-COV-2 SPIKE PROTEIN

(71) Applicants: Alchemab Therapeutics Ltd, London (GB); Barts Health NHS Trust, London (GB)

(72) Inventors: Jane Osbourn, London (GB); Ralph Minter, London (GB); Jacob Galson, London (GB)

(73) Assignees: Alchemab Therapeutics Ltd, London (GB); BARTS HEALTH NHS TRUST, London (GB)

(21) Appl. No.: 17/926,549

(22) PCT Filed: May 20, 2021
(86) PCT No.: PCT/GB2021/051221

§ 371 Date: Nov. 18, 2022

(30) Foreign Application Priority Data
May 20, 2020 (GB) 2007532.1

(51) Int. Cl. C07K 16/10; A61K 45/06; A61K 39/42; A61P 11/00; A61P 31/14

(52) U.S. Cl. CPC C07K 16/10; A61K 45/06; A61K 39/42; A61P 11/00; A61P 31/14; A61K 2039/505

(57) ABSTRACT

There is provided inter alia a polypeptide comprising a CDRH1 sequence comprising or consisting of a sequence sharing 80% or greater sequence identity with a CDRH1 sequence as shown in Table 1 and/or a CDRH2 sequence comprising or consisting of a sequence sharing 80% or greater sequence identity with a CDRH2 sequence as shown in Table 1 and/or a CDRH3 sequence comprising or consisting of a sequence sharing 80% or greater sequence identity with a CDRH3 sequence as shown in Table 1.

### CROSS REFERENCE TO RELATED APPLICATIONS

[0001] This application claims priority to UK Patent Application Number 2007532.1 filed on May 20, 2020 entitled POLYPEPTIDES, the contents of which are herein incorporated by reference in their entirety.

### SEQUENCE LISTING

[0002] The present application is being filed along with a Sequence Listing in electronic format. The Sequence Listing file, entitled 2231_1000PCT.txt, was created on May 19, 2021 and is 1,327,961 bytes in size. The information in electronic format of the Sequence Listing is incorporated herein by reference in its entirety.

### FIELD OF THE INVENTION

[0003] The present invention relates to polypeptides which were identified in the BCR heavy chain repertoire of individuals during SARS-CoV-2 infection. The invention also includes polynucleotides encoding said polypeptides, pharmaceutical compositions comprising said polypeptides and the use of said polypeptides in suppressing or treating a disease or disorder mediated by infection with SARS-CoV-2, for providing prophylaxis to a subject at risk of infection of SARS-CoV-2 or for the diagnosis and/or prediction of outcome of SARS-CoV-2 infection.

### BACKGROUND OF THE INVENTION

[0004] Since the report of the first patients in December 2019^{1,2}, the unprecedented global scale of the COVID-19 pandemic has become apparent. The infectious agent, the SARS-CoV-2 betacoronavirus³, causes mild symptoms in most cases but can cause severe respiratory diseases such as acute respiratory distress syndrome in some individuals. Risk factors for severe disease include age, male gender and underlying co-morbidities⁴.

[0005] Understanding the immune response to SARS-CoV-2 infection is critical to support the development of therapies. Recombinant monoclonal antibodies derived from analysis of B cell receptor (BCR) repertoires in infected patients or the immunisation of animals have been shown to be effective against several infectious diseases including Ebola virus⁵, rabies⁶ and respiratory syncytial virus disease⁷. Such therapeutic antibodies have the potential to protect susceptible populations as well as to treat severe established infections.

[0006] While many vaccine approaches are underway in response to the SARS-CoV-2 outbreak, many of these compositions include as immunogens either whole, attenuated virus or whole spike (S) protein—a viral membrane glycoprotein which mediates cell uptake by binding to host angiotensin-converting enzyme 2 (ACE2). The antibody response to such vaccines will be polyclonal in nature and will likely include both neutralising and non-neutralising antibodies. It is hoped that the neutralising component will be sufficient to provide long-term SARS-CoV-2 immunity following vaccination, although other potential confounders may exist, such as raising antibodies which mediate antibody-dependent enhancement (ADE) of viral entry⁸⁻¹⁰. While ADE is not proven for SARS-CoV-2, prior studies of SARS-CoV-1 in non-human primates showed that, while some S protein antibodies from human SARS-CoV-1 patients were protective, others enhanced the infection via ADE¹¹. An alternative could be to support passive immunity to SARS-CoV-2, by administering one, or a small cocktail of, well-characterised, neutralising antibodies.

[0007] Patients recovering from COVID-19 have already been screened to identify neutralising antibodies, following analysis of relatively small numbers (100-500) of antibody sequences^{12,13}. A more extensive BCR repertoire analysis was performed on six patients in Stanford, USA with signs and symptoms of COVID-19 who also tested positive for SARS-CoV-2 RNA¹⁴. Although no information was provided on the patient outcomes in that study, the analysis demonstrated preferential expression of a subset of immunoglobulin heavy chain (IGH) V gene segments with relatively little somatic hypermutation and showed evidence of convergent antibodies between patients.

[0008] To drive a deeper understanding of the nature of humoral immunity to SARS-CoV-2 infection and to identify potential therapeutic antibodies to SARS-CoV-2, we have evaluated the BCR heavy chain repertoire from 19 individuals at various stages of their immune response. We show that (1) there are stereotypic responses to SARS-CoV-2 infection, (2) infection stimulates both naïve and memory B cell responses, (3) sequence convergence can be used to identify putative SARS-CoV-2 specific antibodies, and (4) sequence convergence can be identified between different SARS-CoV-2 studies in different locations and using different sample types.

[0009] Polypeptides of the present invention may, in at least some embodiments, have one or more of the following advantages compared to the prior art:

[0010] (i) increased binding affinity to SARS-CoV-2, for example SARS-CoV-2 spike protein,

[0011] (ii) increased neutralising potency against SARS-CoV-2,

[0012] (iii) binding to non-spike protein components of SARS-CoV-2 to reduce viral load,

[0013] (iv) binding to host proteins to inhibit virus entry/infection,

[0014] (v) binding to SARS-CoV-2 infected human cells to enable infected cell killing,

[0015] (vi) binding to human cells or soluble factor to modulate immune response to the virus,

[0016] (vii) binding to human cells to alter innate immune responses from structural cells such as epithelial cells,

[0017] (viii) binding to endothelial cells to alter viral-related endothelial inflammation and modulation of the clotting response,

[0018] (ix) activity across all potential anti-viral mechanisms including novel ones (e.g., binding viral epitopes, secreted host epitopes, membrane host epitopes, modulating infected host cells, modulating innate and adaptive immune responses)

[0019] (x) neutralising potential against other/new forms of coronavirus,

[0020] (xi) suitability for administration with other agents in treating COVID-19 (e.g., to enhance anti-viral efficacy), (xii) suitable for prevention or treatment of SARS-CoV-2 infection,

[0021] (xii) suitability for administration by multiple routes (SC, IV, IM, dermal, nasal, oral),

[0022] (xiii) one or more polypeptides can be used in the diagnosis or prediction of outcome post SARS-CoV-2 infection.

### SUMMARY OF THE INVENTION

[0023] According to a first aspect of the invention, there is provided a polypeptide comprising:

[0024] a CDRH1 sequence comprising or consisting of a sequence sharing 80% or greater sequence identity with a CDRH1 sequence as shown in Table 1 and/or

[0025] a CDRH2 sequence comprising or consisting of a sequence sharing 80% or greater sequence identity with a CDRH2 sequence as shown in Table 1 and/or

[0026] a CDRH3 sequence comprising or consisting of a sequence sharing 80% or greater sequence identity with a CDRH3 sequence as shown in Table 1.

[0027] In a further aspect there is provided a polypeptide comprising:

[0028] a FWRH1 sequence comprising or consisting of a sequence sharing 80% or greater sequence identity with a FWRH1 sequence as shown in Table 1 and/or

[0029] a FWRH2 sequence comprising or consisting of a sequence sharing 80% or greater sequence identity with a FWRH2 sequence as shown in Table 1 and/or

[0030] a FWRH3 sequence comprising or consisting of a sequence sharing 80% or greater sequence identity with a FWRH3 sequence as shown in Table 1 and/or

[0031] a FWRH4 sequence comprising or consisting of a sequence sharing 80% or greater sequence identity with a FWRH4 sequence as shown in Table 1.

[0032] In a further aspect there is provided pharmaceutical compositions comprising the polypeptides above and polynucleotides encoding the polypeptides above. Further aspects of the invention will be apparent from the detailed description of the invention.

### DESCRIPTION OF THE FIGURES

[0033] FIG. 1A. B cell responses to SARS-COV-2 infection. IGHV gene segment usage distribution per isotype subclass. Bars show mean values+/− standard error of the mean. Comparisons performed using t-tests, with adjusted p values using Bonferroni correction for multiple comparisons; *p<0.05, **p<0.005, ***p<0.0005.

[0034] FIG. 1B. B cell responses to SARS-COV-2 infection. Isotype subclass distribution between IGHA and IGHG subclasses. Bars show mean values+/− standard error of the mean. Comparisons performed using t-tests, with adjusted p values using Bonferroni correction for multiple comparisons; *p<0.05, **p<0.005, ***p<0.0005.

[0035] FIG. 1C. B cell responses to SARS-COV-2 infection. Mean BCR CDRH3 lengths from COVID-19 patients compared to healthy controls. Bars show mean values+/− standard error of the mean. Comparisons performed using t-tests, with adjusted p values using Bonferroni correction for multiple comparisons; *p<0.05, **p<0.005, ***p<0.0005.

[0036] FIG. 2A. Response characteristics of SARS-CoV-2 infection. Distribution of sequences with different numbers of mutations from germline.

[0037] FIG. 2B. Response characteristics of SARS-CoV-2 infection. Relationship between the proportion of the repertoire comprised by unmutated sequences, and the disease state.

[0038] FIG. 2C. Response characteristics of SARS-CoV-2 infection. Individual sequences were clustered together into related groups to identify clonal expansions (clonotypes). Diversity of all clonotypes in the repertoire calculated using the Shannon diversity index. To normalise for different sequence numbers for each sample, a random subsample of 1,000 sequences was taken.

[0039] FIG. 2D. Response characteristics of SARS-CoV-2 infection. Correlation between the Shannon diversity index, and the proportion of unmutated sequences.

[0040] FIG. 2E. Response characteristics of SARS-CoV-2 infection. The percent of all sequences that fall into the largest 10 clonotypes.

[0041] FIG. 2F. Response characteristics of SARS-CoV-2 infection. Mean number of mutations of all sequences in the largest 10 clonotypes.

[0042] FIG. 3A. Convergent BCR sequence signature within individuals infected with SARS-CoV-2. Data from all patients and healthy controls were clustered together to identify convergent clonotypes. Shown is the number of clonotypes shared by different numbers of participants, grouped by whether the clonotypes are also present in the healthy control dataset.

[0043] FIG. 3B. Convergent BCR sequence signature within individuals infected with SARS-CoV-2. Data from all patients and healthy controls were clustered together to identify convergent clonotypes. Of the convergent clonotypes, the mean mutation count was compared between those that were convergent only within the SARS-CoV-2 patients, and those that were also convergent with the healthy control dataset.

[0044] FIG. 3C. Convergent BCR sequence signature within individuals infected with SARS-CoV-2. Data from all patients and healthy controls were clustered together to identify convergent clonotypes. Of the convergent clonotypes, the CDRH3 AA sequence length was compared between those that were convergent only within the SARS-CoV-2 patients, and those that were also convergent with the healthy control dataset.

[0045] FIG. 3D. Convergent BCR sequence signature within individuals infected with SARS-CoV-2. Data from all patients and healthy controls were clustered together to identify convergent clonotypes. Shown is a heatmap of the 777 convergent COVID-19-associated clonotypes (observed between 4 or more COVID-19 participants) with the 469 convergent clonotypes from seven metastatic breast cancer (BC) patient biopsy samples, demonstrating that the convergent signatures are unique to each disease cohort.

[0046] FIG. 3E. Convergent BCR sequence signature within individuals infected with SARS-CoV-2. Data from all patients and healthy controls were clustered together to identify convergent clonotypes. Shown is the percentage frequencies of four example convergent clonotypes grouped by clinical status. Disclosed are SEQ ID NOS 570, 468, 435, and 467, respectively, in order of appearance

[0047] FIG. 3F. Convergent BCR sequence signature within individuals infected with SARS-CoV-2. Data from all patients and healthy controls were clustered together to identify convergent clonotypes. Shown is a similarity tree of convergent clonotype cluster centers that are significantly associated with clinical status. Groups (i) and (ii) indicate groups of similar convergent clonotypes. An alignment of group (ii) provided adjacent. Disclosed are SEQ ID NOS 907, 943, 433, 570, 461, 435, 974, 655, 468, 481, 552, 480, 458, 467, 722, 742, 851, 558, 440, 540, 463, 487, 575, 559, 416, 467, 722, 742, 851, and 558, respectively, in order of columns.

[0048] FIG. 3G. Convergent BCR sequence signature within individuals infected with SARS-CoV-2. Data from all patients and healthy controls were clustered together to identify convergent clonotypes. Proportions of IGHA and IGHG of the convergent clonotypes that are associated with patients with improving symptoms are shown.

[0049] FIG. 4A. Matches of the 777 convergent clonotypes identified in the present study to other SARS-CoV-2 studies. CDRH3 sequence (shown across the top in black text, SEQ ID NO: 2002), and IGHV/IGHJ gene segments of a sequence identified in the bronchoalveolar lavage fluid of a SARS-CoV-2 patient from a Chinese cohort, and a CDRH3 AA sequence logo unpacking the sequence diversity present in the convergent clonotype found in the COVID-19 patients in this study that had an exact AA match.

[0050] FIG. 4B. Matches of the 777 convergent clonotypes identified in the present study to other SARS-CoV-2 studies. CDRH3 sequence (shown across the top in black text, SEQ ID NO: 2015), and IGHV/IGHJ gene segment of an antibody in the CoV-AbDab (S304) that has SARS-CoV-1 and SARS-CoV-2 neutralising activity, alongside a CDRH3 AA sequence logo unpacking the sequence diversity in the convergent clonotype found in the COVID-19 patients in this study that had an exact AA match.

[0051] FIG. 4C. Matches of the 777 convergent clonotypes identified in the present study to other SARS-CoV-2 studies. Shown is a comparison of convergent clonotypes to the BCR data from Nielsen et al¹⁴. Plotted along the x-axis are the 405 convergent clonotypes represented in at least one Nielsen et al. dataset. Each row represents a separate BCR repertoire from Nielsen et al.; Non-shaded area indicates that the convergent clonotype has a match in the Nielsen dataset.

[0052] FIG. 5A. Distribution of sequences with different numbers of mutations from germline. Each row is a different COVID-19 patient (right).

[0053] FIG. 5B. Distribution of sequences with different numbers of mutations from germline. Each row is a different COVID-19 patient (right).

[0054] FIG. 5C. Distribution of sequences with different numbers of mutations from germline. Each row is a different COVID-19 patient (right).

[0055] FIG. 5D. Distribution of sequences with different numbers of mutations from germline. Each row is a different COVID-19 patient (right).

[0056] FIG. 6. The proportion of IGHG1 sequences containing the autoreactive “NHS” and “AVY” motifs between COVID patients with improving, stable or worsening symptoms. IGHG1 (box) was the only significant correlation. P-values are determined by ANOVA.

[0057] FIG. 7A. Properties of the 777 convergent clonotypes. Pie chart shows isotype subclass usage of the sequences with the 777 convergent clonotypes.

[0058] FIG. 7B. Properties of the 777 convergent clonotypes. Graph shows IGHV gene segment usage of the 777 convergent clonotypes.

[0059] FIG. 8A. Percentage frequencies of the convergent clonotypes grouped by clinical status that significantly associated with clinical status. Disclosed are SEQ ID NOS 655, 943, 552, 559, 575, 463, 742, 570, 435, 416, 481, and 468, respectively, in order of appearance.

[0060] FIG. 8B. Percentage frequencies of the convergent clonotypes grouped by clinical status that significantly associated with clinical status. Disclosed are SEQ ID NOS 487, 722, 461, 467, 540, 558, 480, 458, 440, 974, 851, 433, and 907, respectively, in order of appearance.

[0061] FIG. 9A. Lineage tree of the convergent clonotype that matched to the bronchoalveolar lavage fluid data. Lineage tree represents the members of the clonotype from the patient it was present in. Each node represents a unique sequence within the clonotype lineage tree, with the size indicative of the number of duplicate sequences present. Numbers on the edges of adjoining nodes show the number of mutations between the sequences.

[0062] FIG. 9B. Lineage tree of the convergent clonotype that matched to the bronchoalveolar lavage fluid data. Lineage tree represents the members of the clonotype from the patient it was present in. Each node represents a unique sequence within the clonotype lineage tree, with the size indicative of the number of duplicate sequences present. Numbers on the edges of adjoining nodes show the number of mutations between the sequences.

[0063] FIG. 9C. Lineage tree of the convergent clonotype that matched to the bronchoalveolar lavage fluid data. Lineage tree represents the members of the clonotype from the patient it was present in. Each node represents a unique sequence within the clonotype lineage tree, with the size indicative of the number of duplicate sequences present. Numbers on the edges of adjoining nodes show the number of mutations between the sequences.

[0064] FIG. 9D. Lineage tree of the convergent clonotype that matched to the bronchoalveolar lavage fluid data. Lineage tree represents the members of the clonotype from the patient it was present in. Each node represents a unique sequence within the clonotype lineage tree, with the size indicative of the number of duplicate sequences present. Numbers on the edges of adjoining nodes show the number of mutations between the sequences.

[0065] FIG. 9E. Lineage tree of the convergent clonotype that matched to the bronchoalveolar lavage fluid data. Lineage tree represents the members of the clonotype from the patient it was present in. Each node represents a unique sequence within the clonotype lineage tree, with the size indicative of the number of duplicate sequences present. Numbers on the edges of adjoining nodes show the number of mutations between the sequences.

[0066] FIG. 9F. Lineage tree of the convergent clonotype that matched to the bronchoalveolar lavage fluid data. Lineage tree represents the members of the clonotype from the patient it was present in. Each node represents a unique sequence within the clonotype lineage tree, with the size indicative of the number of duplicate sequences present. Numbers on the edges of adjoining nodes show the number of mutations between the sequences.

[0067] FIG. 9G. Lineage tree of the convergent clonotype that matched to the bronchoalveolar lavage fluid data. Lineage tree represents the members of the clonotype from the patient it was present in. Each node represents a unique sequence within the clonotype lineage tree, with the size indicative of the number of duplicate sequences present. Numbers on the edges of adjoining nodes show the number of mutations between the sequences.

[0068] FIG. 9H. Lineage tree of the convergent clonotype that matched to the bronchoalveolar lavage fluid data. Lineage tree represents the members of the clonotype from the patient it was present in. Each node represents a unique sequence within the clonotype lineage tree, with the size indicative of the number of duplicate sequences present. Numbers on the edges of adjoining nodes show the number of mutations between the sequences.

[0069] FIG. 10. Logo plots unpacking the sequence diversity present for the convergent clonotypes that clustered with CoV-AbDab SARS-CoV-1 or SARS-CoV-2 binding antibodies. The CoV-AbDab reference CDRH3 (corresponding to SEQ ID NOS 2015-2020, respectively, in order of appearance) and IGHV/IGHJ gene segment is displayed above each Logo plot. Gene transcript matches are annotated with “*,” while mismatches are annotated with “**.” The full sequence for 31B9 is not yet publicly available, so its genetic origins are not determined (ND).

### DETAILED DESCRIPTION

[0070] The complementarity determining regions (CDRs) and framework regions (FWRs) of an antibody or fragment thereof may be numbered from N- to C-terminus, i.e. FWR1, CDR1, FWR2, CDR2, FWR3, CDR3 and FWR4. In the context of a heavy chain variable domain, these regions may be denoted with an ‘H’, i.e. FWRH1, CDRH1, FWRH2, CDRH2, FWRH3, CDRH3 and FWRH4.

[0071] Table 1 below provides the polypeptide sequences of immunoglobulin heavy chain variable domains of the invention (VHs) with complementarity determining regions (CDRH1-3) and frameworks (FWRH1-4) of the invention annotated according to the IMGT system (Lefranc et al. “IMGT unique numbering for immunoglobulin and T cell receptor variable domains and Ig superfamily V-like domains” Dev. Comp. Immunol. 27(1):55-77 (2003)). The full length polypeptide sequence of any VH given in Table 1 is the combination of, from N- to C-terminus, FWRH1, CDRH1, FWRH2, CDRH2, FWRH3, CDRH3 and FWRH4 on a single row. For example, the polypeptide sequence of set1_1 is QVQLVESGGGVVQPGRSLRLSCAASGFTFSSYAMHWVRQAPGKGLEWVAVISYDG SNKYYADSVKGRFTISRDNSKNTLYLQMNSLRAEDAVYYCARDGGGYMDVWGQG TTVTVSS (SEQ ID NO: 1). “v_call” and “j_call” refer to the germline V and J gene segments from which the sequence originated, according to the IMGT system.

[0072] Table 2 below also provides the polypeptide sequences of immunoglobulin heavy chain variable domains (VHs) of the invention.

[0073] Based on the experimental work provided herein, it is expected that components of these VHs, such as the complementarity determining regions, frameworks, or combinations of these (such as full length VH sequences) may be utilised in therapeutic or prophylactic agents for treating or preventing SARS-CoV-2 infection, or for performing diagnostic or prognostic analysis of subjects infected, or suspected of being infected, with SARS-CoV-2.

[0074] It is envisaged that the proposed heavy chains be paired with suitable light chains to enable production of monoclonal antibodies, for example in IgG1 format. Cognate light chains can be identified by various methods, including computational prediction (eg Mason et al bioRxiv 617860 (2019)), the use of promiscuous or ‘common light chains’ (eg Xue et al. Biochem Biophys Res Commun. 515(3):481-486, (2019)), high-throughput paired heavy and light chain sequencing to identify native pairings (eg Wang et al Nat Biotechnol. 36(2):152-155 (2018)) and antibody display-based methods to find and optimise heavy and light chain pairings (eg Guo-Qiang et al. Methods Mol Biol. 562:133-142 2009).

TABLE 1
Polypeptide sequences of immunoglobulin heavy chain variable domains
(VHs), from N-to C-terminus, with frameworks and complementarity determining
regions annotated according to the IMGT system

| | | | FWRH1 | CDRH1 | FWRH2 | CDRH2 | FWRH3 | CDRH3 | FWRH4 |
|---|---|---|---|---|---|---|---|---|---|
| VH | | | (SEQ ID | (SEQ ID | (SEQ ID | (SEQ ID | (SEQ ID | (SEQ ID | (SEQ ID |
| name | v_call | j_call | NO) | NO) | NO) | NO) | NO) | NO) | NO) |
| set1_1 | IGHV3- | IGHJ6 | 2 | 38 | 135 | 216 | 304 | 416 | 1196 |
| | 30-3 | | | | | | | | |
| set1_2 | IGHV3- | IGHJ4 | 2 | 39 | 135 | 216 | 304 | 417 | 1197 |
| | 30 | | | | | | | | |
| set1_3 | IGHV4- | IGHJ5 | 3 | 40 | 136 | 217 | 305 | 418 | 1197 |
| | 59 | | | | | | | | |
| set1_4 | IGHV3- | IGHJ4 | 2 | 39 | 135 | 218 | 304 | 419 | 1197 |
| | 33 | | | | | | | | |
| set1_5 | IGHV1- | IGHJ3 | 4 | 41 | 137 | 219 | 306 | 420 | 1197 |
| | 69 | | | | | | | | |
| set2_1 | IGHV3- | IGHJ6 | 5 | 42 | 138 | 220 | 307 | 421 | 1196 |
| | 73 | | | | | | | | |
| set2_2 | IGHV3- | IGHJ4 | 6 | 43 | 139 | 221 | 308 | 422 | 1197 |
| | 74 | | | | | | | | |
| set2_3 | IGHV3- | IGHJ4 | 5 | 42 | 138 | 220 | 307 | 423 | 1197 |
| | 73 | | | | | | | | |
| set2_4 | IGHV3- | IGHJ3 | 5 | 42 | 138 | 220 | 307 | 424 | 1198 |
| | 73 | | | | | | | | |
| set2_5 | IGHV3- | IGHJ4 | 7 | 44 | 140 | 222 | 309 | 425 | 1197 |
| | 15 | | | | | | | | |
| set2_6 | IGHV3- | IGHJ4 | 2 | 45 | 141 | 223 | 310 | 426 | 1197 |
| | 30 | | | | | | | | |
| set2_7 | IGHV4- | IGHJ4 | 8 | 46 | 142 | 224 | 311 | 427 | 1199 |
| | 61 | | | | | | | | |
| set2_8 | IGHV4- | IGHJ4 | 9 | 47 | 143 | 225 | 312 | 428 | 1197 |
| | 59 | | | | | | | | |
| set2_9 | IGHV3- | IGHJ4 | 7 | 48 | 140 | 226 | 313 | 429 | 1197 |
| | 15 | | | | | | | | |
| set2_10 | IGHV4- | IGHJ4 | 10 | 47 | 144 | 225 | 314 | 430 | 1197 |
| | 59 | | | | | | | | |
| set2_11 | IGHV4- | IGHJ4 | 11 | 49 | 145 | 227 | 315 | 431 | 1197 |
| | 39 | | | | | | | | |
| set2_12 | IGHV3- | IGHJ4 | 12 | 50 | 146 | 228 | 304 | 432 | 1197 |
| | 23 | | | | | | | | |
| set2_13 | IGHV5- | IGHJ4 | 13 | 51 | 147 | 229 | 316 | 433 | 1197 |
| | 51 | | | | | | | | |
| set2_14 | IGHV3- | IGHJ6 | 7 | 44 | 140 | 222 | 309 | 434 | 1200 |
| | 15 | | | | | | | | |
| set2_15 | IGHV1- | IGHJ4 | 14 | 52 | 148 | 230 | 317 | 435 | 1197 |
| | 2 | | | | | | | | |
| set2_16 | IGHV4- | IGHJ5 | 15 | 53 | 149 | 231 | 318 | 436 | 1197 |
| | 34 | | | | | | | | |
| set2_17 | IGHV4- | IGHJ4 | 15 | 54 | 150 | 231 | 319 | 437 | 1201 |
| | 34 | | | | | | | | |
| set2_18 | IGHV4- | IGHJ4 | 9 | 47 | 143 | 225 | 320 | 438 | 1197 |
| | 59 | | | | | | | | |
| set2_19 | IGHV4- | IGHJ4 | 9 | 47 | 143 | 225 | 312 | 439 | 1197 |
| | 59 | | | | | | | | |
| set2_20 | IGHV4- | IGHJ4 | 16 | 55 | 151 | 232 | 321 | 440 | 1197 |
| | 4 | | | | | | | | |
| set2_21 | IGHV1- | IGHJ4 | 14 | 56 | 152 | 233 | 322 | 441 | 1202 |
| | 18 | | | | | | | | |
| set2_22 | IGHV1- | IGHJ5 | 14 | 57 | 153 | 234 | 323 | 442 | 1197 |
| | 8 | | | | | | | | |
| set2_23 | IGHV3- | IGHJ4 | 5 | 42 | 138 | 220 | 307 | 443 | 1197 |
| | 73 | | | | | | | | |
| set2_24 | IGHV4- | IGHJ5 | 16 | 55 | 151 | 232 | 321 | 444 | 1197 |
| | 4 | | | | | | | | |
| set2_25 | IGHV3- | IGHJ4 | 2 | 39 | 135 | 218 | 304 | 445 | 1197 |
| | 33 | | | | | | | | |
| set2_26 | IGHV3- | IGHJ4 | 6 | 58 | 154 | 235 | 324 | 446 | 1197 |
| | 48 | | | | | | | | |
| set2_27 | IGHV3- | IGHJ4 | 6 | 59 | 155 | 236 | 304 | 447 | 1197 |
| | 66 | | | | | | | | |
| set2_28 | IGHV3- | IGHJ5 | 6 | 60 | 156 | 237 | 325 | 448 | 1197 |
| | 74 | | | | | | | | |
| set2_29 | IGHV5- | IGHJ4 | 17 | 61 | 157 | 229 | 326 | 449 | 1197 |
| | 51 | | | | | | | | |
| set2_30 | IGHV3- | IGHJ6 | 2 | 39 | 135 | 218 | 304 | 450 | 1196 |
| | 33 | | | | | | | | |
| set2_31 | IGHV3- | IGHJ4 | 18 | 62 | 158 | 238 | 327 | 451 | 1197 |
| | 9 | | | | | | | | |
| set2_32 | IGHV5- | IGHJ3 | 17 | 63 | 157 | 239 | 328 | 452 | 1198 |
| | 51 | | | | | | | | |
| set2_33 | IGHV3- | IGHJ4 | 2 | 38 | 135 | 216 | 304 | 453 | 1197 |
| | 30 | | | | | | | | |
| set2_34 | IGHV3- | IGHJ4 | 19 | 64 | 159 | 240 | 329 | 454 | 1197 |
| | 74 | | | | | | | | |
| set2_35 | IGHV3- | IGHJ4 | 20 | 65 | 160 | 241 | 330 | 455 | 1197 |
| | 11 | | | | | | | | |
| set2_36 | IGHV3- | IGHJ4 | 6 | 59 | 155 | 236 | 304 | 456 | 1197 |
| | 66 | | | | | | | | |
| set2_37 | IGHV5- | IGHJ3 | 17 | 61 | 157 | 229 | 326 | 457 | 1198 |
| | 51 | | | | | | | | |
| set2_38 | IGHV3- | IGHJ4 | 2 | 39 | 135 | 218 | 304 | 458 | 1197 |
| | 33 | | | | | | | | |
| set2_39 | IGHV3- | IGHJ4 | 2 | 38 | 135 | 216 | 304 | 459 | 1197 |
| | 30 | | | | | | | | |
| set2_40 | IGHV3- | IGHJ4 | 2 | 38 | 135 | 216 | 304 | 460 | 1197 |
| | 30 | | | | | | | | |
| set2_41 | IGHV3- | IGHJ4 | 2 | 38 | 135 | 216 | 304 | 461 | 1197 |
| | 30 | | | | | | | | |
| set2_42 | IGHV3- | IGHJ5 | 2 | 38 | 135 | 216 | 304 | 462 | 1197 |
| | 30 | | | | | | | | |
| set2_43 | IGHV3- | IGHJ2 | 2 | 39 | 135 | 218 | 304 | 463 | 1203 |
| | 33 | | | | | | | | |
| set2_44 | IGHV3- | IGHJ4 | 2 | 38 | 135 | 216 | 304 | 464 | 1197 |
| | 30 | | | | | | | | |
| set2_45 | IGHV3- | IGHJ4 | 2 | 39 | 135 | 218 | 304 | 465 | 1197 |
| | 33 | | | | | | | | |
| set2_46 | IGHV3- | IGHJ6 | 2 | 38 | 135 | 216 | 304 | 466 | 1196 |
| | 30-3 | | | | | | | | |
| set2_47 | IGHV3- | IGHJ3 | 2 | 38 | 135 | 216 | 304 | 467 | 1198 |
| | 30-3 | | | | | | | | |
| set2_48 | IGHV3- | IGHJ4 | 21 | 59 | 155 | 236 | 304 | 468 | 1197 |
| | 66 | | | | | | | | |
| set2_49 | IGHV3- | IGHJ4 | 2 | 39 | 135 | 218 | 304 | 469 | 1197 |
| | 33 | | | | | | | | |
| set2_50 | IGHV3- | IGHJ4 | 2 | 38 | 135 | 216 | 304 | 470 | 1197 |
| | 30 | | | | | | | | |
| set2_51 | IGHV4- | IGHJ4 | 15 | 66 | 161 | 242 | 312 | 471 | 1197 |
| | 34 | | | | | | | | |
| set2_52 | IGHV3- | IGHJ3 | 2 | 38 | 135 | 216 | 304 | 472 | 1198 |
| | 30 | | | | | | | | |
| set2_53 | IGHV3- | IGHJ5 | 2 | 38 | 135 | 216 | 304 | 473 | 1197 |
| | 30 | | | | | | | | |
| set2_54 | IGHV4- | IGHJ4 | 22 | 67 | 143 | 232 | 331 | 474 | 1197 |
| | 30-2 | | | | | | | | |
| set2_55 | IGHV3- | IGHJ4 | 2 | 38 | 135 | 216 | 304 | 475 | 1197 |
| | 30 | | | | | | | | |
| set2_56 | IGHV3- | IGHJ4 | 2 | 39 | 135 | 218 | 304 | 476 | 1197 |
| | 33 | | | | | | | | |
| set2_57 | IGHV3- | IGHJ4 | 2 | 39 | 135 | 218 | 304 | 477 | 1197 |
| | 33 | | | | | | | | |
| set2_58 | IGHV3- | IGHJ6 | 2 | 68 | 162 | 243 | 332 | 478 | 1204 |
| | 30 | | | | | | | | |
| set2_59 | IGHV3- | IGHJ6 | 2 | 39 | 135 | 216 | 304 | 479 | 1196 |
| | 30 | | | | | | | | |
| set2_60 | IGHV3- | IGHJ4 | 21 | 59 | 155 | 236 | 304 | 480 | 1197 |
| | 53 | | | | | | | | |
| set2_61 | IGHV3- | IGHJ2 | 2 | 38 | 135 | 216 | 304 | 481 | 1203 |
| | 30 | | | | | | | | |
| set2_62 | IGHV3- | IGHJ4 | 2 | 39 | 135 | 216 | 304 | 482 | 1197 |
| | 30 | | | | | | | | |
| set2_63 | IGHV1- | IGHJ3 | 23 | 69 | 163 | 244 | 333 | 483 | 1205 |
| | 18 | | | | | | | | |
| set2_64 | IGHV3- | IGHJ4 | 6 | 58 | 154 | 235 | 324 | 484 | 1197 |
| | 48 | | | | | | | | |
| set2_65 | IGHV1- | IGHJ4 | 14 | 70 | 164 | 245 | 334 | 485 | 1197 |
| | 18 | | | | | | | | |
| set2_66 | IGHV3- | IGHJ4 | 2 | 38 | 135 | 216 | 304 | 486 | 1197 |
| | 30 | | | | | | | | |
| set2_67 | IGHV3- | IGHJ5 | 2 | 38 | 135 | 216 | 304 | 487 | 1197 |
| | 30 | | | | | | | | |
| set2_68 | IGHV3- | IGHJ4 | 2 | 38 | 135 | 216 | 304 | 488 | 1197 |
| | 30 | | | | | | | | |
| set2_69 | IGHV1- | IGHJ4 | 4 | 71 | 165 | 246 | 335 | 489 | 1197 |
| | 69 | | | | | | | | |
| set2_70 | IGHV3- | IGHJ4 | 2 | 39 | 135 | 216 | 304 | 490 | 1197 |
| | 30 | | | | | | | | |
| set2_71 | IGHV3- | IGHJ4 | 2 | 38 | 135 | 216 | 304 | 491 | 1197 |
| | 30 | | | | | | | | |
| set2_72 | IGHV3- | IGHJ4 | 2 | 38 | 135 | 216 | 304 | 492 | 1197 |
| | 30 | | | | | | | | |
| set2_73 | IGHV3- | IGHJ3 | 2 | 38 | 135 | 216 | 304 | 493 | 1198 |
| | 30-3 | | | | | | | | |
| set2_74 | IGHV3- | IGHJ4 | 2 | 38 | 135 | 216 | 304 | 494 | 1197 |
| | 30 | | | | | | | | |
| set2_75 | IGHV3- | IGHJ4 | 6 | 58 | 154 | 235 | 324 | 495 | 1197 |
| | 48 | | | | | | | | |
| set2_76 | IGHV3- | IGHJ4 | 2 | 39 | 135 | 216 | 304 | 496 | 1197 |
| | 30 | | | | | | | | |
| set2_77 | IGHV3- | IGHJ4 | 2 | 39 | 135 | 216 | 304 | 497 | 1197 |
| | 30 | | | | | | | | |
| set2_78 | IGHV3- | IGHJ4 | 2 | 39 | 135 | 216 | 304 | 498 | 1197 |
| | 30 | | | | | | | | |
| set2_79 | IGHV3- | IGHJ4 | 2 | 38 | 135 | 216 | 304 | 499 | 1197 |
| | 30-3 | | | | | | | | |
| set2_80 | IGHV3- | IGHJ6 | 2 | 38 | 135 | 216 | 304 | 500 | 1196 |
| | 30 | | | | | | | | |
| set2_81 | IGHV3- | IGHJ6 | 2 | 39 | 135 | 218 | 304 | 501 | 1206 |
| | 33 | | | | | | | | |
| set2_82 | IGHV3- | IGHJ4 | 2 | 38 | 135 | 216 | 304 | 502 | 1197 |
| | 30-3 | | | | | | | | |
| set2_83 | IGHV3- | IGHJ3 | 2 | 38 | 135 | 216 | 304 | 503 | 1198 |
| | 30 | | | | | | | | |
| set2_84 | IGHV2- | IGHJ4 | 24 | 72 | 166 | 247 | 336 | 504 | 1197 |
| | 5 | | | | | | | | |
| set2_85 | IGHV3- | IGHJ4 | 2 | 73 | 135 | 248 | 337 | 505 | 1207 |
| | 30 | | | | | | | | |
| set2_86 | IGHV3- | IGHJ5 | 6 | 59 | 155 | 236 | 338 | 506 | 1197 |
| | 53 | | | | | | | | |
| set2_87 | IGHV3- | IGHJ6 | 2 | 38 | 135 | 216 | 304 | 507 | 1196 |
| | 30-3 | | | | | | | | |
| set2_88 | IGHV2- | IGHJ4 | 25 | 74 | 167 | 249 | 339 | 508 | 1197 |
| | 70 | | | | | | | | |
| set2_89 | IGHV2- | IGHJ4 | 24 | 72 | 166 | 247 | 336 | 509 | 1197 |
| | 5 | | | | | | | | |
| set2_90 | IGHV3- | IGHJ6 | 2 | 39 | 135 | 218 | 304 | 510 | 1196 |
| | 33 | | | | | | | | |
| set2_91 | IGHV3- | IGHJ4 | 2 | 75 | 168 | 250 | 340 | 511 | 1197 |
| | 33 | | | | | | | | |
| set2_92 | IGHV3- | IGHJ4 | 7 | 58 | 169 | 251 | 341 | 512 | 1197 |
| | 21 | | | | | | | | |
| set2_93 | IGHV3- | IGHJ6 | 2 | 39 | 135 | 216 | 304 | 513 | 1196 |
| | 30 | | | | | | | | |
| set2_94 | IGHV1- | IGHJ4 | 14 | 76 | 170 | 252 | 342 | 514 | 1197 |
| | 46 | | | | | | | | |
| set2_95 | IGHV4- | IGHJ6 | 15 | 66 | 161 | 242 | 312 | 515 | 1196 |
| | 34 | | | | | | | | |
| set2_96 | IGHV2- | IGHJ4 | 25 | 74 | 167 | 249 | 339 | 516 | 1197 |
| | 70 | | | | | | | | |
| set2_97 | IGHV3- | IGHJ4 | 6 | 43 | 171 | 253 | 343 | 517 | 1197 |
| | 7 | | | | | | | | |
| set2_98 | IGHV1- | IGHJ5 | 14 | 70 | 164 | 245 | 334 | 518 | 1197 |
| | 18 | | | | | | | | |
| set2_99 | IGHV3- | IGHJ4 | 26 | 77 | 172 | 216 | 344 | 519 | 1197 |
| | 30-3 | | | | | | | | |
| set2_100 | IGHV3- | IGHJ6 | 21 | 59 | 173 | 236 | 304 | 520 | 1208 |
| | 53 | | | | | | | | |
| set2_101 | IGHV4- | IGHJ6 | 11 | 78 | 174 | 225 | 345 | 521 | 1196 |
| | 39 | | | | | | | | |
| set2_102 | IGHV3- | IGHJ3 | 21 | 59 | 155 | 236 | 304 | 522 | 1198 |
| | 53 | | | | | | | | |
| set2_103 | IGHV4- | IGHJ6 | 15 | 66 | 161 | 242 | 312 | 523 | 1196 |
| | 34 | | | | | | | | |
| set2_104 | IGHV3- | IGHJ4 | 12 | 38 | 146 | 254 | 304 | 524 | 1197 |
| | 23 | | | | | | | | |
| set2_105 | IGHV3- | IGHJ4 | 2 | 38 | 135 | 216 | 304 | 525 | 1197 |
| | 30 | | | | | | | | |
| set2_106 | IGHV1- | IGHJ3 | 14 | 70 | 164 | 245 | 334 | 526 | 1198 |
| | 18 | | | | | | | | |
| set2_107 | IGHV4- | IGHJ6 | 16 | 79 | 151 | 255 | 346 | 527 | 1209 |
| | 4 | | | | | | | | |
| set2_108 | IGHV4- | IGHJ4 | 15 | 66 | 161 | 242 | 312 | 528 | 1197 |
| | 34 | | | | | | | | |
| set2_109 | IGHV4- | IGHJ4 | 9 | 47 | 175 | 256 | 347 | 529 | 1197 |
| | 4 | | | | | | | | |
| set2_110 | IGHV3- | IGHJ5 | 6 | 80 | 171 | 253 | 348 | 530 | 1197 |
| | 7 | | | | | | | | |
| set2_111 | IGHV2- | IGHJ4 | 25 | 74 | 167 | 249 | 339 | 531 | 1197 |
| | 70 | | | | | | | | |
| set2_112 | IGHV2- | IGHJ5 | 24 | 72 | 166 | 247 | 336 | 532 | 1197 |
| | 5 | | | | | | | | |
| set2_113 | IGHV2- | IGHJ5 | 27 | 81 | 166 | 247 | 349 | 533 | 1197 |
| | 5 | | | | | | | | |
| set2_114 | IGHV3- | IGHJ6 | 2 | 39 | 135 | 218 | 304 | 534 | 1196 |
| | 33 | | | | | | | | |
| set2_115 | IGHV5- | IGHJ6 | 17 | 61 | 157 | 229 | 326 | 535 | 1196 |
| | 51 | | | | | | | | |
| set2_116 | IGHV3- | IGHJ4 | 2 | 38 | 135 | 216 | 304 | 536 | 1197 |
| | 30-3 | | | | | | | | |
| set2_117 | IGHV3- | IGHJ4 | 2 | 82 | 176 | 257 | 350 | 537 | 1202 |
| | 30 | | | | | | | | |
| set2_118 | IGHV3- | IGHJ4 | 2 | 38 | 135 | 216 | 304 | 538 | 1197 |
| | 30 | | | | | | | | |
| set2_119 | IGHV3- | IGHJ3 | 2 | 38 | 135 | 216 | 304 | 539 | 1198 |
| | 30 | | | | | | | | |
| set2_120 | IGHV3- | IGHJ4 | 2 | 83 | 135 | 216 | 304 | 540 | 1197 |
| | 30 | | | | | | | | |
| set2_121 | IGHV3- | IGHJ6 | 2 | 39 | 135 | 218 | 304 | 541 | 1196 |
| | 33 | | | | | | | | |
| set2_122 | IGHV1- | IGHJ4 | 14 | 84 | 148 | 230 | 351 | 542 | 1197 |
| | 2 | | | | | | | | |
| set2_123 | IGHV5- | IGHJ4 | 17 | 61 | 157 | 229 | 326 | 543 | 1197 |
| | 51 | | | | | | | | |
| set2_124 | IGHV3- | IGHJ4 | 7 | 85 | 169 | 251 | 341 | 544 | 1197 |
| | 21 | | | | | | | | |
| set2_125 | IGHV3- | IGHJ4 | 2 | 38 | 135 | 216 | 304 | 545 | 1197 |
| | 30 | | | | | | | | |
| set2_126 | IGHV2- | IGHJ4 | 24 | 72 | 166 | 247 | 336 | 546 | 1197 |
| | 5 | | | | | | | | |
| set2_127 | IGHV4- | IGHJ4 | 9 | 47 | 143 | 225 | 312 | 547 | 1197 |
| | 59 | | | | | | | | |
| set2_128 | IGHV3- | IGHJ4 | 2 | 86 | 177 | 216 | 352 | 548 | 1197 |
| | 30-3 | | | | | | | | |
| set2_129 | IGHV3- | IGHJ3 | 2 | 38 | 135 | 216 | 304 | 549 | 1198 |
| | 30 | | | | | | | | |
| set2_130 | IGHV2- | IGHJ3 | 24 | 72 | 166 | 247 | 336 | 550 | 1198 |
| | 5 | | | | | | | | |
| set2_131 | IGHV3- | IGHJ4 | 2 | 87 | 135 | 258 | 353 | 551 | 1197 |
| | 33 | | | | | | | | |
| set2_132 | IGHV3- | IGHJ4 | 2 | 39 | 135 | 216 | 304 | 552 | 1197 |
| | 30 | | | | | | | | |
| set2_133 | IGHV3- | IGHJ4 | 2 | 39 | 135 | 216 | 304 | 553 | 1197 |
| | 30 | | | | | | | | |
| set2_134 | IGHV3- | IGHJ3 | 2 | 39 | 135 | 218 | 304 | 554 | 1198 |
| | 33 | | | | | | | | |
| set2_135 | IGHV3- | IGHJ4 | 2 | 39 | 135 | 218 | 304 | 555 | 1197 |
| | 33 | | | | | | | | |
| set2_136 | IGHV3- | IGHJ3 | 2 | 38 | 135 | 216 | 304 | 556 | 1198 |
| | 30 | | | | | | | | |
| set2_137 | IGHV2- | IGHJ4 | 25 | 74 | 167 | 249 | 339 | 557 | 1197 |
| | 70 | | | | | | | | |
| set2_138 | IGHV3- | IGHJ4 | 2 | 39 | 135 | 218 | 354 | 558 | 1197 |
| | 33 | | | | | | | | |
| set2_139 | IGHV3- | IGHJ6 | 2 | 39 | 135 | 259 | 304 | 559 | 1196 |
| | 30 | | | | | | | | |
| set2_140 | IGHV4- | IGHJ4 | 11 | 88 | 145 | 225 | 355 | 560 | 1197 |
| | 39 | | | | | | | | |
| set2_141 | IGHV4- | IGHJ4 | 15 | 66 | 161 | 242 | 312 | 561 | 1197 |
| | 34 | | | | | | | | |
| set2_142 | IGHV3- | IGHJ6 | 2 | 39 | 135 | 218 | 304 | 562 | 1196 |
| | 33 | | | | | | | | |
| set2_143 | IGHV3- | IGHJ4 | 2 | 38 | 135 | 216 | 304 | 563 | 1197 |
| | 30 | | | | | | | | |
| set2_144 | IGHV3- | IGHJ4 | 2 | 38 | 135 | 216 | 304 | 564 | 1197 |
| | 30-3 | | | | | | | | |
| set2_145 | IGHV3- | IGHJ4 | 2 | 39 | 135 | 218 | 304 | 565 | 1197 |
| | 33 | | | | | | | | |
| set2_146 | IGHV3- | IGHJ6 | 2 | 38 | 135 | 216 | 304 | 566 | 1196 |
| | 30-3 | | | | | | | | |
| set2_147 | IGHV2- | IGHJ4 | 24 | 72 | 166 | 247 | 336 | 567 | 1197 |
| | 5 | | | | | | | | |
| set2_148 | IGHV3- | IGHJ4 | 2 | 38 | 135 | 216 | 304 | 568 | 1197 |
| | 30-3 | | | | | | | | |
| set2_149 | IGHV3- | IGHJ6 | 2 | 39 | 135 | 218 | 304 | 569 | 1196 |
| | 33 | | | | | | | | |
| set2_150 | IGHV4- | IGHJ4 | 9 | 47 | 143 | 225 | 312 | 570 | 1197 |
| | 59 | | | | | | | | |
| set2_151 | IGHV3- | IGHJ6 | 2 | 38 | 135 | 216 | 304 | 571 | 1200 |
| | 30 | | | | | | | | |
| set2_152 | IGHV3- | IGHJ6 | 2 | 38 | 135 | 216 | 304 | 572 | 1196 |
| | 30-3 | | | | | | | | |
| set2_153 | IGHV3- | IGHJ4 | 2 | 39 | 135 | 216 | 304 | 573 | 1197 |
| | 30 | | | | | | | | |
| set2_154 | IGHV3- | IGHJ4 | 28 | 89 | 178 | 260 | 356 | 574 | 1197 |
| | 49 | | | | | | | | |
| set2_155 | IGHV3- | IGHJ6 | 2 | 39 | 135 | 218 | 304 | 575 | 1196 |
| | 33 | | | | | | | | |
| set2_156 | IGHV3- | IGHJ6 | 2 | 38 | 135 | 216 | 304 | 576 | 1196 |
| | 30 | | | | | | | | |
| set2_157 | IGHV3- | IGHJ4 | 2 | 39 | 135 | 218 | 304 | 577 | 1197 |
| | 33 | | | | | | | | |
| set2_158 | IGHV3- | IGHJ4 | 12 | 38 | 146 | 254 | 304 | 578 | 1197 |
| | 23 | | | | | | | | |
| set2_159 | IGHV3- | IGHJ4 | 6 | 43 | 171 | 253 | 343 | 579 | 1197 |
| | 7 | | | | | | | | |
| set2_160 | IGHV1- | IGHJ4 | 4 | 90 | 179 | 261 | 357 | 580 | 1197 |
| | 69 | | | | | | | | |
| set2_161 | IGHV3- | IGHJ3 | 2 | 91 | 135 | 216 | 304 | 581 | 1198 |
| | 30 | | | | | | | | |
| set2_162 | IGHV4- | IGHJ4 | 15 | 66 | 161 | 242 | 312 | 582 | 1197 |
| | 34 | | | | | | | | |
| set2_163 | IGHV2- | IGHJ4 | 25 | 74 | 167 | 249 | 339 | 583 | 1197 |
| | 70 | | | | | | | | |
| set2_164 | IGHV3- | IGHJ4 | 2 | 39 | 135 | 218 | 304 | 584 | 1197 |
| | 33 | | | | | | | | |
| set2_165 | IGHV4- | IGHJ6 | 15 | 66 | 161 | 242 | 312 | 585 | 1196 |
| | 34 | | | | | | | | |
| set2_166 | IGHV3- | IGHJ4 | 2 | 39 | 135 | 216 | 304 | 586 | 1197 |
| | 30 | | | | | | | | |
| set2_167 | IGHV3- | IGHJ3 | 2 | 39 | 135 | 218 | 304 | 587 | 1198 |
| | 33 | | | | | | | | |
| set2_168 | IGHV3- | IGHJ4 | 2 | 39 | 135 | 218 | 304 | 588 | 1197 |
| | 33 | | | | | | | | |
| set2_169 | IGHV1- | IGHJ4 | 14 | 84 | 148 | 230 | 351 | 589 | 1197 |
| | 2 | | | | | | | | |
| set2_170 | IGHV3- | IGHJ6 | 2 | 39 | 135 | 218 | 304 | 590 | 1196 |
| | 33 | | | | | | | | |
| set2_171 | IGHV3- | IGHJ4 | 2 | 39 | 135 | 216 | 304 | 591 | 1197 |
| | 30 | | | | | | | | |
| set2_172 | IGHV3- | IGHJ6 | 2 | 38 | 135 | 216 | 304 | 592 | 1196 |
| | 30 | | | | | | | | |
| set2_173 | IGHV3- | IGHJ3 | 2 | 39 | 135 | 218 | 304 | 593 | 1198 |
| | 33 | | | | | | | | |
| set2_174 | IGHV3- | IGHJ4 | 18 | 92 | 180 | 262 | 358 | 594 | 1210 |
| | 9 | | | | | | | | |
| set2_175 | IGHV3- | IGHJ4 | 2 | 39 | 135 | 218 | 304 | 595 | 1197 |
| | 33 | | | | | | | | |
| set2_176 | IGHV3- | IGHJ4 | 2 | 38 | 135 | 216 | 304 | 596 | 1197 |
| | 30 | | | | | | | | |
| set2_177 | IGHV3- | IGHJ6 | 2 | 39 | 135 | 218 | 304 | 597 | 1196 |
| | 33 | | | | | | | | |
| set2_178 | IGHV3- | IGHJ3 | 7 | 58 | 169 | 251 | 341 | 598 | 1198 |
| | 21 | | | | | | | | |
| set2_179 | IGHV3- | IGHJ3 | 2 | 93 | 181 | 263 | 359 | 599 | 1211 |
| | 30-3 | | | | | | | | |
| set2_180 | IGHV2- | IGHJ3 | 25 | 74 | 167 | 249 | 339 | 600 | 1198 |
| | 70 | | | | | | | | |
| set2_181 | IGHV3- | IGHJ4 | 2 | 39 | 135 | 216 | 304 | 601 | 1197 |
| | 30 | | | | | | | | |
| set2_182 | IGHV3- | IGHJ4 | 2 | 38 | 135 | 216 | 304 | 602 | 1197 |
| | 30 | | | | | | | | |
| set2_183 | IGHV3- | IGHJ4 | 2 | 38 | 135 | 216 | 304 | 603 | 1197 |
| | 30-3 | | | | | | | | |
| set2_184 | IGHV3- | IGHJ4 | 2 | 39 | 135 | 218 | 304 | 604 | 1197 |
| | 33 | | | | | | | | |
| set2_185 | IGHV1- | IGHJ4 | 14 | 70 | 164 | 245 | 334 | 605 | 1197 |
| | 18 | | | | | | | | |
| set2_186 | IGHV3- | IGHJ3 | 2 | 38 | 135 | 216 | 304 | 606 | 1198 |
| | 30-3 | | | | | | | | |
| set2_187 | IGHV4- | IGHJ4 | 9 | 47 | 143 | 225 | 312 | 607 | 1197 |
| | 59 | | | | | | | | |
| set2_188 | IGHV2- | IGHJ2 | 29 | 94 | 182 | 264 | 360 | 608 | 1203 |
| | 26 | | | | | | | | |
| set2_189 | IGHV3- | IGHJ4 | 18 | 92 | 158 | 238 | 361 | 609 | 1197 |
| | 9 | | | | | | | | |
| set2_190 | IGHV3- | IGHJ6 | 2 | 39 | 135 | 216 | 304 | 610 | 1196 |
| | 30 | | | | | | | | |
| set2_191 | IGHV5- | IGHJ6 | 17 | 61 | 157 | 229 | 326 | 611 | 1196 |
| | 51 | | | | | | | | |
| set2_192 | IGHV3- | IGHJ4 | 2 | 39 | 135 | 216 | 304 | 612 | 1197 |
| | 30 | | | | | | | | |
| set2_193 | IGHV3- | IGHJ4 | 12 | 38 | 146 | 254 | 304 | 613 | 1197 |
| | 23 | | | | | | | | |
| set2_194 | IGHV1- | IGHJ4 | 14 | 70 | 164 | 245 | 334 | 614 | 1197 |
| | 18 | | | | | | | | |
| set2_195 | IGHV1- | IGHJ6 | 14 | 70 | 164 | 245 | 334 | 615 | 1196 |
| | 18 | | | | | | | | |
| set2_196 | IGHV3- | IGHJ6 | 2 | 39 | 135 | 218 | 304 | 616 | 1196 |
| | 33 | | | | | | | | |
| set2_197 | IGHV3- | IGHJ4 | 2 | 95 | 135 | 265 | 304 | 617 | 1197 |
| | 30-3 | | | | | | | | |
| set2_198 | IGHV3- | IGHJ6 | 2 | 39 | 135 | 216 | 304 | 618 | 1196 |
| | 30 | | | | | | | | |
| set2_199 | IGHV2- | IGHJ4 | 25 | 74 | 167 | 249 | 339 | 619 | 1197 |
| | 70 | | | | | | | | |
| set2_200 | IGHV3- | IGHJ6 | 2 | 39 | 135 | 218 | 304 | 620 | 1196 |
| | 33 | | | | | | | | |
| set2_201 | IGHV3- | IGHJ4 | 2 | 38 | 135 | 216 | 304 | 621 | 1197 |
| | 30 | | | | | | | | |
| set2_202 | IGHV3- | IGHJ4 | 2 | 39 | 135 | 218 | 304 | 622 | 1197 |
| | 33 | | | | | | | | |
| set2_203 | IGHV3- | IGHJ6 | 2 | 39 | 135 | 216 | 304 | 623 | 1196 |
| | 30 | | | | | | | | |
| set2_204 | IGHV3- | IGHJ6 | 12 | 96 | 183 | 266 | 362 | 569 | 1196 |
| | 23 | | | | | | | | |
| set2_205 | IGHV3- | IGHJ6 | 2 | 39 | 135 | 218 | 304 | 624 | 1196 |
| | 33 | | | | | | | | |
| set2_206 | IGHV3- | IGHJ6 | 2 | 39 | 135 | 216 | 304 | 625 | 1196 |
| | 30 | | | | | | | | |
| set2_207 | IGHV3- | IGHJ3 | 2 | 39 | 135 | 218 | 304 | 626 | 1198 |
| | 33 | | | | | | | | |
| set2_208 | IGHV3- | IGHJ4 | 2 | 97 | 135 | 216 | 304 | 627 | 1197 |
| | 30-3 | | | | | | | | |
| set2_209 | IGHV5- | IGHJ4 | 17 | 61 | 157 | 229 | 326 | 628 | 1197 |
| | 51 | | | | | | | | |
| set2_210 | IGHV2- | IGHJ4 | 25 | 74 | 167 | 249 | 339 | 629 | 1197 |
| | 70 | | | | | | | | |
| set2_211 | IGHV3- | IGHJ4 | 2 | 38 | 135 | 216 | 304 | 630 | 1197 |
| | 30 | | | | | | | | |
| set2_212 | IGHV3- | IGHJ4 | 2 | 39 | 135 | 218 | 304 | 631 | 1197 |
| | 33 | | | | | | | | |
| set2_213 | IGHV3- | IGHJ4 | 2 | 39 | 135 | 218 | 304 | 632 | 1197 |
| | 33 | | | | | | | | |
| set2_214 | IGHV3- | IGHJ6 | 2 | 39 | 135 | 216 | 304 | 633 | 1196 |
| | 30 | | | | | | | | |
| set2_215 | IGHV3- | IGHJ4 | 2 | 39 | 135 | 218 | 304 | 634 | 1197 |
| | 33 | | | | | | | | |
| set2_216 | IGHV3- | IGHJ4 | 2 | 39 | 135 | 218 | 304 | 635 | 1197 |
| | 33 | | | | | | | | |
| set2_217 | IGHV3- | IGHJ4 | 2 | 39 | 135 | 218 | 304 | 636 | 1197 |
| | 33 | | | | | | | | |
| set2_218 | IGHV5- | IGHJ4 | 17 | 61 | 157 | 229 | 326 | 637 | 1197 |
| | 51 | | | | | | | | |
| set2_219 | IGHV2- | IGHJ6 | 24 | 72 | 166 | 247 | 363 | 638 | 1196 |
| | 5 | | | | | | | | |
| set2_220 | IGHV1- | IGHJ5 | 30 | 98 | 184 | 267 | 364 | 639 | 1197 |
| | 24 | | | | | | | | |
| set2_221 | IGHV3- | IGHJ6 | 2 | 39 | 135 | 218 | 304 | 640 | 1200 |
| | 33 | | | | | | | | |
| set2_222 | IGHV4- | IGHJ6 | 15 | 66 | 161 | 242 | 312 | 641 | 1200 |
| | 34 | | | | | | | | |
| set2_223 | IGHV3- | IGHJ4 | 2 | 38 | 135 | 216 | 304 | 642 | 1197 |
| | 30 | | | | | | | | |
| set2_224 | IGHV3- | IGHJ6 | 2 | 39 | 135 | 218 | 304 | 643 | 1196 |
| | 33 | | | | | | | | |
| set2_225 | IGHV3- | IGHJ6 | 2 | 99 | 135 | 268 | 365 | 644 | 1212 |
| | 33 | | | | | | | | |
| set2_226 | IGHV3- | IGHJ4 | 6 | 43 | 171 | 253 | 343 | 645 | 1197 |
| | 7 | | | | | | | | |
| set2_227 | IGHV4- | IGHJ4 | 9 | 47 | 143 | 269 | 366 | 646 | 1213 |
| | 59 | | | | | | | | |
| set2_228 | IGHV3- | IGHJ4 | 18 | 92 | 158 | 238 | 361 | 647 | 1197 |
| | 9 | | | | | | | | |
| set2_229 | IGHV3- | IGHJ4 | 2 | 38 | 135 | 216 | 304 | 648 | 1197 |
| | 30 | | | | | | | | |
| set2_230 | IGHV2- | IGHJ6 | 24 | 72 | 166 | 247 | 336 | 649 | 1196 |
| | 5 | | | | | | | | |
| set2_231 | IGHV3- | IGHJ4 | 2 | 39 | 135 | 218 | 304 | 650 | 1197 |
| | 33 | | | | | | | | |
| set2_232 | IGHV3- | IGHJ6 | 2 | 39 | 135 | 218 | 304 | 651 | 1200 |
| | 33 | | | | | | | | |
| set2_233 | IGHV3- | IGHJ4 | 2 | 38 | 135 | 216 | 304 | 652 | 1197 |
| | 30 | | | | | | | | |
| set2_234 | IGHV3- | IGHJ3 | 2 | 38 | 135 | 216 | 304 | 653 | 1198 |
| | 30 | | | | | | | | |
| set2_235 | IGHV3- | IGHJ6 | 2 | 38 | 135 | 216 | 304 | 654 | 1196 |
| | 30 | | | | | | | | |
| set2_236 | IGHV1- | IGHJ3 | 31 | 100 | 185 | 270 | 367 | 655 | 1198 |
| | 58 | | | | | | | | |
| set2_237 | IGHV3- | IGHJ4 | 2 | 38 | 135 | 216 | 304 | 656 | 1197 |
| | 30 | | | | | | | | |
| set2_238 | IGHV3- | IGHJ4 | 7 | 58 | 169 | 251 | 368 | 657 | 1197 |
| | 21 | | | | | | | | |
| set2_239 | IGHV3- | IGHJ4 | 6 | 43 | 171 | 253 | 343 | 658 | 1213 |
| | 7 | | | | | | | | |
| set2_240 | IGHV3- | IGHJ6 | 2 | 38 | 135 | 216 | 304 | 659 | 1196 |
| | 30 | | | | | | | | |
| set2_241 | IGHV3- | IGHJ4 | 2 | 38 | 135 | 216 | 304 | 660 | 1197 |
| | 30 | | | | | | | | |
| set2_242 | IGHV3- | IGHJ6 | 2 | 38 | 135 | 216 | 304 | 661 | 1196 |
| | 30 | | | | | | | | |
| set2_243 | IGHV3- | IGHJ4 | 2 | 39 | 135 | 218 | 304 | 662 | 1197 |
| | 33 | | | | | | | | |
| set2_244 | IGHV3- | IGHJ6 | 2 | 38 | 135 | 216 | 304 | 663 | 1200 |
| | 30 | | | | | | | | |
| set2_245 | IGHV3- | IGHJ6 | 2 | 38 | 135 | 216 | 304 | 664 | 1196 |
| | 30 | | | | | | | | |
| set2_246 | IGHV3- | IGHJ4 | 12 | 38 | 146 | 254 | 304 | 665 | 1197 |
| | 23 | | | | | | | | |
| set2_247 | IGHV1- | IGHJ4 | 14 | 70 | 164 | 245 | 334 | 666 | 1197 |
| | 18 | | | | | | | | |
| set2_248 | IGHV3- | IGHJ4 | 2 | 38 | 135 | 216 | 304 | 667 | 1197 |
| | 30 | | | | | | | | |
| set2_249 | IGHV3- | IGHJ3 | 2 | 101 | 135 | 216 | 369 | 668 | 1198 |
| | 30 | | | | | | | | |
| set2_250 | IGHV3- | IGHJ6 | 2 | 102 | 135 | 271 | 370 | 669 | 1196 |
| | 33 | | | | | | | | |
| set2_251 | IGHV3- | IGHJ4 | 6 | 43 | 171 | 253 | 343 | 670 | 1197 |
| | 7 | | | | | | | | |
| set2_252 | IGHV3- | IGHJ5 | 2 | 38 | 135 | 216 | 304 | 671 | 1197 |
| | 30-3 | | | | | | | | |
| set2_253 | IGHV3- | IGHJ4 | 2 | 39 | 135 | 216 | 304 | 672 | 1197 |
| | 30 | | | | | | | | |
| set2_254 | IGHV3- | IGHJ4 | 2 | 39 | 135 | 218 | 304 | 673 | 1197 |
| | 33 | | | | | | | | |
| set2_255 | IGHV3- | IGHJ4 | 6 | 43 | 139 | 221 | 308 | 674 | 1197 |
| | 74 | | | | | | | | |
| set2_256 | IGHV3- | IGHJ4 | 2 | 39 | 135 | 218 | 304 | 675 | 1197 |
| | 33 | | | | | | | | |
| set2_257 | IGHV3- | IGHJ4 | 2 | 39 | 135 | 218 | 304 | 676 | 1197 |
| | 33 | | | | | | | | |
| set2_258 | IGHV3- | IGHJ6 | 20 | 65 | 186 | 272 | 341 | 677 | 1200 |
| | 11 | | | | | | | | |
| set2_259 | IGHV3- | IGHJ4 | 2 | 39 | 135 | 218 | 304 | 678 | 1197 |
| | 33 | | | | | | | | |
| set2_260 | IGHV3- | IGHJ5 | 2 | 39 | 135 | 218 | 304 | 679 | 1197 |
| | 33 | | | | | | | | |
| set2_261 | IGHV3- | IGHJ4 | 2 | 39 | 135 | 218 | 304 | 680 | 1197 |
| | 33 | | | | | | | | |
| set2_262 | IGHV3- | IGHJ5 | 2 | 38 | 135 | 216 | 304 | 681 | 1197 |
| | 30 | | | | | | | | |
| set2_263 | IGHV3- | IGHJ6 | 2 | 38 | 135 | 216 | 304 | 682 | 1196 |
| | 30-3 | | | | | | | | |
| set2_264 | IGHV2- | IGHJ4 | 25 | 74 | 167 | 249 | 339 | 683 | 1197 |
| | 70 | | | | | | | | |
| set2_265 | IGHV3- | IGHJ4 | 6 | 43 | 139 | 221 | 308 | 684 | 1197 |
| | 74 | | | | | | | | |
| set2_266 | IGHV2- | IGHJ4 | 24 | 72 | 166 | 247 | 336 | 685 | 1197 |
| | 5 | | | | | | | | |
| set2_267 | IGHV3- | IGHJ4 | 2 | 38 | 135 | 216 | 304 | 686 | 1197 |
| | 30 | | | | | | | | |
| set2_268 | IGHV3- | IGHJ4 | 2 | 39 | 135 | 216 | 304 | 687 | 1197 |
| | 30 | | | | | | | | |
| set2_269 | IGHV3- | IGHJ4 | 2 | 39 | 135 | 216 | 304 | 688 | 1197 |
| | 30 | | | | | | | | |
| set2_270 | IGHV3- | IGHJ4 | 6 | 43 | 139 | 221 | 308 | 689 | 1197 |
| | 74 | | | | | | | | |
| set2_271 | IGHV5- | IGHJ4 | 17 | 61 | 157 | 229 | 326 | 690 | 1197 |
| | 51 | | | | | | | | |
| set2_272 | IGHV3- | IGHJ5 | 2 | 38 | 135 | 216 | 304 | 671 | 1197 |
| | 30 | | | | | | | | |
| set2_273 | IGHV3- | IGHJ4 | 2 | 39 | 135 | 218 | 304 | 691 | 1197 |
| | 33 | | | | | | | | |
| set2_274 | IGHV3- | IGHJ4 | 2 | 38 | 135 | 216 | 304 | 692 | 1197 |
| | 30-3 | | | | | | | | |
| set2_275 | IGHV3- | IGHJ4 | 2 | 39 | 135 | 216 | 304 | 693 | 1197 |
| | 30 | | | | | | | | |
| set2_276 | IGHV4- | IGHJ4 | 15 | 66 | 161 | 242 | 312 | 694 | 1197 |
| | 34 | | | | | | | | |
| set2_277 | IGHV3- | IGHJ4 | 2 | 38 | 135 | 216 | 304 | 695 | 1197 |
| | 30 | | | | | | | | |
| set2_278 | IGHV3- | IGHJ5 | 2 | 38 | 135 | 216 | 304 | 696 | 1214 |
| | 30 | | | | | | | | |
| set2_279 | IGHV3- | IGHJ3 | 2 | 38 | 135 | 216 | 304 | 697 | 1198 |
| | 30 | | | | | | | | |
| set2_280 | IGHV3- | IGHJ4 | 2 | 39 | 135 | 218 | 304 | 698 | 1197 |
| | 33 | | | | | | | | |
| set2_281 | IGHV3- | IGHJ4 | 2 | 39 | 135 | 218 | 304 | 699 | 1197 |
| | 33 | | | | | | | | |
| set2_282 | IGHV3- | IGHJ4 | 2 | 38 | 135 | 216 | 304 | 700 | 1197 |
| | 30 | | | | | | | | |
| set2_283 | IGHV3- | IGHJ4 | 12 | 38 | 146 | 254 | 304 | 701 | 1197 |
| | 23 | | | | | | | | |
| set2_284 | IGHV3- | IGHJ4 | 2 | 38 | 135 | 216 | 304 | 702 | 1197 |
| | 30 | | | | | | | | |
| set2_285 | IGHV3- | IGHJ4 | 2 | 39 | 135 | 218 | 304 | 703 | 1197 |
| | 33 | | | | | | | | |
| set2_286 | IGHV3- | IGHJ4 | 2 | 38 | 135 | 216 | 304 | 704 | 1197 |
| | 30 | | | | | | | | |
| set2_287 | IGHV3- | IGHJ6 | 2 | 39 | 135 | 218 | 304 | 705 | 1200 |
| | 33 | | | | | | | | |
| set2_288 | IGHV3- | IGHJ4 | 6 | 43 | 139 | 221 | 308 | 706 | 1197 |
| | 74 | | | | | | | | |
| set2_289 | IGHV3- | IGHJ6 | 2 | 39 | 135 | 218 | 304 | 707 | 1196 |
| | 33 | | | | | | | | |
| set2_290 | IGHV3- | IGHJ6 | 2 | 39 | 135 | 218 | 304 | 708 | 1196 |
| | 33 | | | | | | | | |
| set2_291 | IGHV3- | IGHJ4 | 2 | 38 | 187 | 216 | 304 | 709 | 1197 |
| | 30-3 | | | | | | | | |
| set2_292 | IGHV2- | IGHJ4 | 25 | 74 | 167 | 249 | 339 | 710 | 1197 |
| | 70 | | | | | | | | |
| set2_293 | IGHV3- | IGHJ6 | 7 | 58 | 169 | 251 | 341 | 711 | 1196 |
| | 21 | | | | | | | | |
| set2_294 | IGHV3- | IGHJ4 | 2 | 39 | 135 | 273 | 371 | 712 | 1197 |
| | 33 | | | | | | | | |
| set2_295 | IGHV3- | IGHJ4 | 28 | 103 | 178 | 260 | 356 | 713 | 1215 |
| | 49 | | | | | | | | |
| set2_296 | IGHV3- | IGHJ6 | 2 | 38 | 135 | 216 | 372 | 714 | 1196 |
| | 30-3 | | | | | | | | |
| set2_297 | IGHV5- | IGHJ4 | 17 | 61 | 157 | 229 | 326 | 715 | 1197 |
| | 51 | | | | | | | | |
| set2_298 | IGHV3- | IGHJ4 | 2 | 38 | 135 | 216 | 304 | 716 | 1197 |
| | 30 | | | | | | | | |
| set2_299 | IGHV3- | IGHJ5 | 2 | 101 | 135 | 274 | 373 | 717 | 1203 |
| | 30 | | | | | | | | |
| set2_300 | IGHV3- | IGHJ4 | 2 | 38 | 135 | 216 | 304 | 718 | 1197 |
| | 30 | | | | | | | | |
| set2_301 | IGHV3- | IGHJ4 | 2 | 38 | 135 | 216 | 304 | 719 | 1197 |
| | 30 | | | | | | | | |
| set2_302 | IGHV3- | IGHJ3 | 2 | 38 | 135 | 216 | 304 | 720 | 1198 |
| | 30 | | | | | | | | |
| set2_303 | IGHV3- | IGHJ4 | 2 | 38 | 135 | 216 | 304 | 721 | 1197 |
| | 30 | | | | | | | | |
| set2_304 | IGHV3- | IGHJ3 | 2 | 38 | 135 | 216 | 304 | 722 | 1198 |
| | 30-3 | | | | | | | | |
| set2_305 | IGHV3- | IGHJ6 | 2 | 38 | 135 | 216 | 304 | 723 | 1196 |
| | 30 | | | | | | | | |
| set2_306 | IGHV3- | IGHJ6 | 2 | 38 | 188 | 275 | 374 | 724 | 1196 |
| | 30 | | | | | | | | |
| set2_307 | IGHV3- | IGHJ3 | 2 | 38 | 135 | 216 | 304 | 725 | 1198 |
| | 30 | | | | | | | | |
| set2_308 | IGHV3- | IGHJ4 | 2 | 38 | 135 | 216 | 304 | 726 | 1197 |
| | 30 | | | | | | | | |
| set2_309 | IGHV1- | IGHJ5 | 30 | 98 | 184 | 267 | 364 | 727 | 1197 |
| | 24 | | | | | | | | |
| set2_310 | IGHV3- | IGHJ5 | 2 | 38 | 135 | 216 | 304 | 728 | 1197 |
| | 30 | | | | | | | | |
| set2_311 | IGHV1- | IGHJ5 | 30 | 98 | 184 | 267 | 364 | 729 | 1197 |
| | 24 | | | | | | | | |
| set2_312 | IGHV3- | IGHJ4 | 2 | 38 | 135 | 216 | 304 | 730 | 1197 |
| | 30 | | | | | | | | |
| set2_313 | IGHV3- | IGHJ6 | 2 | 104 | 141 | 276 | 375 | 731 | 1196 |
| | 30-3 | | | | | | | | |
| set2_314 | IGHV2- | IGHJ4 | 24 | 72 | 166 | 247 | 336 | 732 | 1197 |
| | 5 | | | | | | | | |
| set2_315 | IGHV3- | IGHJ3 | 2 | 38 | 135 | 216 | 304 | 733 | 1198 |
| | 30-3 | | | | | | | | |
| set2_316 | IGHV3- | IGHJ6 | 7 | 58 | 169 | 251 | 341 | 734 | 1196 |
| | 21 | | | | | | | | |
| set2_317 | IGHV3- | IGHJ3 | 2 | 38 | 135 | 216 | 304 | 735 | 1198 |
| | 30-3 | | | | | | | | |
| set2_318 | IGHV3- | IGHJ3 | 2 | 38 | 135 | 216 | 304 | 736 | 1198 |
| | 30 | | | | | | | | |
| set2_319 | IGHV3- | IGHJ4 | 2 | 38 | 135 | 216 | 304 | 737 | 1197 |
| | 30 | | | | | | | | |
| set2_320 | IGHV1- | IGHJ5 | 30 | 98 | 184 | 267 | 364 | 738 | 1197 |
| | 24 | | | | | | | | |
| set2_321 | IGHV3- | IGHJ5 | 2 | 38 | 135 | 216 | 304 | 739 | 1197 |
| | 30 | | | | | | | | |
| set2_322 | IGHV3- | IGHJ4 | 2 | 38 | 135 | 216 | 304 | 740 | 1197 |
| | 30-3 | | | | | | | | |
| set2_323 | IGHV3- | IGHJ3 | 2 | 38 | 135 | 216 | 304 | 741 | 1198 |
| | 30 | | | | | | | | |
| set2_324 | IGHV3- | IGHJ5 | 2 | 38 | 135 | 216 | 304 | 742 | 1197 |
| | 30-3 | | | | | | | | |
| set2_325 | IGHV3- | IGHJ6 | 2 | 38 | 135 | 216 | 304 | 743 | 1196 |
| | 30-3 | | | | | | | | |
| set2_326 | IGHV3- | IGHJ6 | 2 | 38 | 135 | 216 | 304 | 744 | 1196 |
| | 30 | | | | | | | | |
| set2_327 | IGHV3- | IGHJ4 | 2 | 38 | 135 | 216 | 304 | 745 | 1197 |
| | 30 | | | | | | | | |
| set2_328 | IGHV1- | IGHJ5 | 30 | 98 | 184 | 267 | 364 | 746 | 1197 |
| | 24 | | | | | | | | |
| set2_329 | IGHV3- | IGHJ4 | 2 | 39 | 135 | 216 | 304 | 747 | 1197 |
| | 30 | | | | | | | | |
| set2_330 | IGHV3- | IGHJ4 | 2 | 38 | 135 | 216 | 304 | 748 | 1197 |
| | 30 | | | | | | | | |
| set2_331 | IGHV3- | IGHJ4 | 6 | 43 | 171 | 253 | 343 | 749 | 1197 |
| | 7 | | | | | | | | |
| set2_332 | IGHV3- | IGHJ4 | 2 | 38 | 135 | 216 | 304 | 750 | 1197 |
| | 30-3 | | | | | | | | |
| set2_333 | IGHV3- | IGHJ4 | 2 | 38 | 135 | 216 | 304 | 751 | 1197 |
| | 30 | | | | | | | | |
| set2_334 | IGHV3- | IGHJ4 | 2 | 38 | 135 | 216 | 304 | 752 | 1197 |
| | 30 | | | | | | | | |
| set2_335 | IGHV3- | IGHJ6 | 2 | 38 | 135 | 216 | 304 | 753 | 1196 |
| | 30-3 | | | | | | | | |
| set2_336 | IGHV1- | IGHJ5 | 30 | 98 | 184 | 267 | 364 | 754 | 1197 |
| | 24 | | | | | | | | |
| set2_337 | IGHV3- | IGHJ5 | 2 | 38 | 135 | 216 | 304 | 755 | 1197 |
| | 30 | | | | | | | | |
| set2_338 | IGHV3- | IGHJ4 | 2 | 38 | 135 | 216 | 304 | 756 | 1197 |
| | 30 | | | | | | | | |
| set2_339 | IGHV3- | IGHJ4 | 6 | 43 | 171 | 253 | 343 | 757 | 1197 |
| | 7 | | | | | | | | |
| set2_340 | IGHV3- | IGHJ4 | 2 | 38 | 189 | 216 | 376 | 758 | 1197 |
| | 30 | | | | | | | | |
| set2_341 | IGHV3- | IGHJ4 | 2 | 38 | 135 | 216 | 304 | 759 | 1197 |
| | 30 | | | | | | | | |
| set2_342 | IGHV3- | IGHJ4 | 7 | 58 | 169 | 251 | 341 | 760 | 1197 |
| | 21 | | | | | | | | |
| set2_343 | IGHV3- | IGHJ6 | 2 | 39 | 135 | 218 | 304 | 761 | 1196 |
| | 33 | | | | | | | | |
| set2_344 | IGHV3- | IGHJ4 | 2 | 38 | 135 | 216 | 304 | 762 | 1197 |
| | 30-3 | | | | | | | | |
| set2_345 | IGHV3- | IGHJ5 | 2 | 38 | 135 | 216 | 304 | 763 | 1197 |
| | 30-3 | | | | | | | | |
| set2_346 | IGHV4- | IGHJ6 | 9 | 47 | 143 | 225 | 312 | 764 | 1200 |
| | 59 | | | | | | | | |
| set2_347 | IGHV1- | IGHJ5 | 30 | 98 | 184 | 267 | 364 | 765 | 1197 |
| | 24 | | | | | | | | |
| set2_348 | IGHV3- | IGHJ4 | 2 | 38 | 135 | 216 | 304 | 766 | 1197 |
| | 30 | | | | | | | | |
| set2_349 | IGHV3- | IGHJ6 | 2 | 101 | 135 | 216 | 304 | 767 | 1196 |
| | 30-3 | | | | | | | | |
| set2_350 | IGHV1- | IGHJ5 | 30 | 98 | 184 | 267 | 364 | 768 | 1197 |
| | 24 | | | | | | | | |
| set2_351 | IGHV3- | IGHJ3 | 2 | 38 | 135 | 216 | 304 | 769 | 1198 |
| | 30 | | | | | | | | |
| set2_352 | IGHV3- | IGHJ6 | 2 | 105 | 141 | 216 | 377 | 770 | 1196 |
| | 30 | | | | | | | | |
| set2_353 | IGHV3- | IGHJ4 | 2 | 39 | 135 | 218 | 304 | 771 | 1197 |
| | 33 | | | | | | | | |
| set2_354 | IGHV1- | IGHJ5 | 30 | 98 | 184 | 267 | 364 | 772 | 1197 |
| | 24 | | | | | | | | |
| set2_355 | IGHV1- | IGHJ5 | 30 | 98 | 184 | 267 | 364 | 773 | 1197 |
| | 24 | | | | | | | | |
| set2_356 | IGHV3- | IGHJ4 | 6 | 106 | 190 | 277 | 378 | 774 | 1197 |
| | 13 | | | | | | | | |
| set2_357 | IGHV3- | IGHJ4 | 2 | 38 | 135 | 278 | 379 | 775 | 1197 |
| | 30 | | | | | | | | |
| set2_358 | IGHV3- | IGHJ4 | 32 | 107 | 191 | 279 | 380 | 776 | 1197 |
| | 30 | | | | | | | | |
| set2_359 | IGHV3- | IGHJ3 | 2 | 38 | 135 | 216 | 304 | 777 | 1198 |
| | 30-3 | | | | | | | | |
| set2_360 | IGHV3- | IGHJ3 | 2 | 39 | 135 | 216 | 304 | 778 | 1198 |
| | 30 | | | | | | | | |
| set2_361 | IGHV3- | IGHJ4 | 2 | 38 | 135 | 216 | 304 | 779 | 1197 |
| | 30 | | | | | | | | |
| set2_362 | IGHV1- | IGHJ5 | 30 | 98 | 184 | 267 | 364 | 780 | 1197 |
| | 24 | | | | | | | | |
| set2_363 | IGHV1- | IGHJ5 | 30 | 98 | 184 | 267 | 364 | 781 | 1197 |
| | 24 | | | | | | | | |
| set2_364 | IGHV1- | IGHJ5 | 30 | 98 | 184 | 267 | 364 | 782 | 1197 |
| | 24 | | | | | | | | |
| set2_365 | IGHV1- | IGHJ5 | 30 | 98 | 184 | 267 | 364 | 783 | 1197 |
| | 24 | | | | | | | | |
| set2_366 | IGHV3- | IGHJ4 | 2 | 38 | 135 | 216 | 304 | 784 | 1197 |
| | 30-3 | | | | | | | | |
| set2_367 | IGHV3- | IGHJ4 | 2 | 38 | 135 | 216 | 304 | 785 | 1197 |
| | 30-3 | | | | | | | | |
| set2_368 | IGHV3- | IGHJ4 | 2 | 39 | 135 | 216 | 304 | 786 | 1197 |
| | 30 | | | | | | | | |
| set2_369 | IGHV2- | IGHJ4 | 25 | 74 | 167 | 249 | 339 | 787 | 1197 |
| | 70 | | | | | | | | |
| set2_370 | IGHV3- | IGHJ3 | 2 | 39 | 135 | 216 | 304 | 788 | 1198 |
| | 30 | | | | | | | | |
| set2_371 | IGHV3- | IGHJ4 | 2 | 38 | 135 | 216 | 304 | 789 | 1197 |
| | 30 | | | | | | | | |
| set2_372 | IGHV3- | IGHJ5 | 2 | 38 | 135 | 216 | 304 | 790 | 1197 |
| | 30-3 | | | | | | | | |
| set2_373 | IGHV3- | IGHJ4 | 2 | 38 | 135 | 216 | 304 | 791 | 1197 |
| | 30 | | | | | | | | |
| set2_374 | IGHV3- | IGHJ3 | 2 | 101 | 135 | 216 | 381 | 792 | 1198 |
| | 30 | | | | | | | | |
| set2_375 | IGHV3- | IGHJ2 | 6 | 106 | 190 | 280 | 378 | 793 | 1203 |
| | 13 | | | | | | | | |
| set2_376 | IGHV3- | IGHJ6 | 2 | 39 | 135 | 218 | 304 | 794 | 1196 |
| | 33 | | | | | | | | |
| set2_377 | IGHV3- | IGHJ4 | 2 | 39 | 135 | 216 | 304 | 795 | 1197 |
| | 30 | | | | | | | | |
| set2_378 | IGHV3- | IGHJ4 | 2 | 38 | 135 | 216 | 304 | 796 | 1197 |
| | 30 | | | | | | | | |
| set2_379 | IGHV3- | IGHJ6 | 6 | 43 | 171 | 253 | 343 | 797 | 1196 |
| | 7 | | | | | | | | |
| set2_380 | IGHV3- | IGHJ3 | 2 | 38 | 135 | 216 | 304 | 798 | 1198 |
| | 30 | | | | | | | | |
| set2_381 | IGHV3- | IGHJ4 | 2 | 38 | 135 | 216 | 304 | 799 | 1197 |
| | 30 | | | | | | | | |
| set2_382 | IGHV3- | IGHJ4 | 2 | 38 | 135 | 216 | 304 | 800 | 1197 |
| | 30 | | | | | | | | |
| set2_383 | IGHV3- | IGHJ4 | 2 | 38 | 135 | 216 | 304 | 801 | 1197 |
| | 30-3 | | | | | | | | |
| set2_384 | IGHV3- | IGHJ4 | 2 | 38 | 135 | 216 | 304 | 802 | 1197 |
| | 30 | | | | | | | | |
| set2_385 | IGHV3- | IGHJ4 | 2 | 38 | 135 | 216 | 304 | 803 | 1197 |
| | 30 | | | | | | | | |
| set2_386 | IGHV1- | IGHJ4 | 30 | 98 | 184 | 267 | 364 | 804 | 1197 |
| | 24 | | | | | | | | |
| set2_387 | IGHV3- | IGHJ6 | 2 | 38 | 135 | 216 | 304 | 805 | 1196 |
| | 30 | | | | | | | | |
| set2_388 | IGHV1- | IGHJ4 | 30 | 98 | 184 | 267 | 364 | 806 | 1197 |
| | 24 | | | | | | | | |
| set2_389 | IGHV3- | IGHJ4 | 2 | 38 | 135 | 216 | 304 | 807 | 1197 |
| | 30 | | | | | | | | |
| set2_390 | IGHV3- | IGHJ5 | 2 | 38 | 135 | 216 | 304 | 808 | 1197 |
| | 30-3 | | | | | | | | |
| set2_391 | IGHV3- | IGHJ4 | 2 | 38 | 135 | 216 | 304 | 809 | 1197 |
| | 30 | | | | | | | | |
| set2_392 | IGHV3- | IGHJ3 | 2 | 38 | 135 | 216 | 304 | 810 | 1198 |
| | 30 | | | | | | | | |
| set2_393 | IGHV2- | IGHJ4 | 33 | 74 | 192 | 249 | 339 | 811 | 1197 |
| | 70 | | | | | | | | |
| set2_394 | IGHV3- | IGHJ4 | 2 | 38 | 135 | 216 | 304 | 812 | 1197 |
| | 30 | | | | | | | | |
| set2_395 | IGHV3- | IGHJ6 | 2 | 39 | 135 | 218 | 304 | 813 | 1196 |
| | 33 | | | | | | | | |
| set2_396 | IGHV3- | IGHJ3 | 2 | 38 | 135 | 216 | 304 | 814 | 1198 |
| | 30-3 | | | | | | | | |
| set2_397 | IGHV3- | IGHJ3 | 2 | 38 | 135 | 216 | 304 | 815 | 1198 |
| | 30 | | | | | | | | |
| set2_398 | IGHV3- | IGHJ3 | 2 | 38 | 135 | 216 | 304 | 816 | 1198 |
| | 30 | | | | | | | | |
| set2_399 | IGHV3- | IGHJ4 | 2 | 38 | 135 | 216 | 304 | 817 | 1197 |
| | 30 | | | | | | | | |
| set2_400 | IGHV3- | IGHJ4 | 2 | 38 | 135 | 216 | 304 | 818 | 1197 |
| | 30 | | | | | | | | |
| set2_401 | IGHV1- | IGHJ5 | 30 | 98 | 184 | 267 | 364 | 819 | 1197 |
| | 24 | | | | | | | | |
| set2_402 | IGHV3- | IGHJ6 | 2 | 39 | 135 | 216 | 304 | 820 | 1196 |
| | 30 | | | | | | | | |
| set2_403 | IGHV3- | IGHJ4 | 7 | 58 | 169 | 251 | 341 | 821 | 1197 |
| | 21 | | | | | | | | |
| set2_404 | IGHV3- | IGHJ4 | 6 | 106 | 190 | 277 | 378 | 822 | 1197 |
| | 13 | | | | | | | | |
| set2_405 | IGHV3- | IGHJ5 | 2 | 38 | 135 | 216 | 304 | 823 | 1197 |
| | 30 | | | | | | | | |
| set2_406 | IGHV3- | IGHJ4 | 6 | 43 | 171 | 253 | 343 | 824 | 1197 |
| | 7 | | | | | | | | |
| set2_407 | IGHV3- | IGHJ4 | 2 | 38 | 135 | 216 | 304 | 825 | 1197 |
| | 30-3 | | | | | | | | |
| set2_408 | IGHV2- | IGHJ4 | 25 | 74 | 167 | 249 | 339 | 826 | 1197 |
| | 70 | | | | | | | | |
| set2_409 | IGHV3- | IGHJ4 | 2 | 38 | 135 | 216 | 304 | 827 | 1197 |
| | 30 | | | | | | | | |
| set2_410 | IGHV3- | IGHJ4 | 6 | 108 | 154 | 272 | 341 | 828 | 1197 |
| | 48 | | | | | | | | |
| set2_411 | IGHV3- | IGHJ5 | 2 | 38 | 135 | 216 | 304 | 829 | 1197 |
| | 30 | | | | | | | | |
| set2_412 | IGHV3- | IGHJ4 | 2 | 91 | 135 | 281 | 304 | 830 | 1197 |
| | 30 | | | | | | | | |
| set2_413 | IGHV1- | IGHJ5 | 30 | 98 | 184 | 267 | 364 | 831 | 1197 |
| | 24 | | | | | | | | |
| set2_414 | IGHV3- | IGHJ6 | 2 | 39 | 135 | 218 | 304 | 832 | 1196 |
| | 33 | | | | | | | | |
| set2_415 | IGHV3- | IGHJ4 | 2 | 38 | 135 | 216 | 382 | 833 | 1197 |
| | 30 | | | | | | | | |
| set2_416 | IGHV3- | IGHJ3 | 2 | 38 | 193 | 216 | 383 | 834 | 1198 |
| | 30-3 | | | | | | | | |
| set2_417 | IGHV3- | IGHJ5 | 2 | 38 | 135 | 216 | 304 | 835 | 1197 |
| | 30 | | | | | | | | |
| set2_418 | IGHV3- | IGHJ3 | 2 | 39 | 135 | 216 | 304 | 836 | 1198 |
| | 30 | | | | | | | | |
| set2_419 | IGHV3- | IGHJ4 | 12 | 38 | 146 | 254 | 304 | 837 | 1197 |
| | 23 | | | | | | | | |
| set2_420 | IGHV3- | IGHJ4 | 2 | 39 | 135 | 216 | 304 | 838 | 1197 |
| | 30 | | | | | | | | |
| set2_421 | IGHV3- | IGHJ5 | 2 | 38 | 135 | 216 | 304 | 839 | 1197 |
| | 30 | | | | | | | | |
| set2_422 | IGHV3- | IGHJI | 2 | 38 | 181 | 216 | 304 | 840 | 1197 |
| | 30 | | | | | | | | |
| set2_423 | IGHV1- | IGHJ4 | 14 | 70 | 164 | 245 | 334 | 841 | 1197 |
| | 18 | | | | | | | | |
| set2_424 | IGHV3- | IGHJ4 | 2 | 38 | 135 | 216 | 304 | 842 | 1197 |
| | 30-3 | | | | | | | | |
| set2_425 | IGHV4- | IGHJ3 | 8 | 109 | 194 | 225 | 355 | 843 | 1198 |
| | 31 | | | | | | | | |
| set2_426 | IGHV3- | IGHJ4 | 2 | 38 | 135 | 216 | 304 | 844 | 1197 |
| | 30 | | | | | | | | |
| set2_427 | IGHV3- | IGHJ4 | 7 | 110 | 169 | 251 | 341 | 845 | 1197 |
| | 21 | | | | | | | | |
| set2_428 | IGHV3- | IGHJ4 | 2 | 38 | 135 | 216 | 304 | 846 | 1197 |
| | 30-3 | | | | | | | | |
| set2_429 | IGHV3- | IGHJ6 | 2 | 39 | 135 | 216 | 304 | 847 | 1196 |
| | 30 | | | | | | | | |
| set2_430 | IGHV3- | IGHJ4 | 2 | 111 | 135 | 216 | 384 | 848 | 1197 |
| | 30-3 | | | | | | | | |
| set2_431 | IGHV3- | IGHJ4 | 2 | 38 | 135 | 216 | 304 | 849 | 1197 |
| | 30 | | | | | | | | |
| set2_432 | IGHV3- | IGHJ4 | 2 | 38 | 135 | 216 | 304 | 850 | 1197 |
| | 30 | | | | | | | | |
| set2_433 | IGHV3- | IGHJ4 | 12 | 38 | 146 | 254 | 304 | 851 | 1197 |
| | 23 | | | | | | | | |
| set2_434 | IGHV1- | IGHJ6 | 30 | 98 | 184 | 267 | 364 | 852 | 1200 |
| | 24 | | | | | | | | |
| set2_435 | IGHV3- | IGHJ5 | 2 | 38 | 135 | 216 | 304 | 853 | 1197 |
| | 30 | | | | | | | | |
| set2_436 | IGHV3- | IGHJ3 | 2 | 38 | 135 | 216 | 304 | 854 | 1198 |
| | 30 | | | | | | | | |
| set2_437 | IGHV3- | IGHJ6 | 2 | 38 | 135 | 216 | 385 | 855 | 1196 |
| | 30-3 | | | | | | | | |
| set2_438 | IGHV3- | IGHJ4 | 2 | 39 | 135 | 216 | 304 | 856 | 1197 |
| | 30 | | | | | | | | |
| set2_439 | IGHV3- | IGHJ5 | 2 | 38 | 135 | 216 | 304 | 857 | 1197 |
| | 30-3 | | | | | | | | |
| set2_440 | IGHV1- | IGHJ5 | 30 | 98 | 184 | 267 | 364 | 858 | 1197 |
| | 24 | | | | | | | | |
| set2_441 | IGHV3- | IGHJ4 | 2 | 38 | 135 | 216 | 304 | 859 | 1197 |
| | 30 | | | | | | | | |
| set2_442 | IGHV3- | IGHJ4 | 2 | 38 | 135 | 216 | 304 | 860 | 1197 |
| | 30-3 | | | | | | | | |
| set2_443 | IGHV3- | IGHJ6 | 2 | 38 | 135 | 216 | 304 | 861 | 1196 |
| | 30 | | | | | | | | |
| set2_444 | IGHV3- | IGHJ4 | 2 | 38 | 135 | 216 | 304 | 862 | 1197 |
| | 30-3 | | | | | | | | |
| set2_445 | IGHV3- | IGHJI | 2 | 112 | 195 | 216 | 386 | 863 | 1197 |
| | 30-3 | | | | | | | | |
| set2_446 | IGHV3- | IGHJ6 | 6 | 58 | 154 | 235 | 341 | 864 | 1196 |
| | 48 | | | | | | | | |
| set2_447 | IGHV3- | IGHJ4 | 18 | 92 | 158 | 238 | 361 | 865 | 1197 |
| | 9 | | | | | | | | |
| set2_448 | IGHV3- | IGHJ4 | 2 | 39 | 135 | 218 | 304 | 866 | 1197 |
| | 33 | | | | | | | | |
| set2_449 | IGHV3- | IGHJ6 | 2 | 39 | 135 | 216 | 304 | 867 | 1196 |
| | 30 | | | | | | | | |
| set2_450 | IGHV1- | IGHJ5 | 30 | 98 | 184 | 267 | 387 | 868 | 1197 |
| | 24 | | | | | | | | |
| set2_451 | IGHV1- | IGHJ5 | 30 | 98 | 184 | 267 | 364 | 869 | 1197 |
| | 24 | | | | | | | | |
| set2_452 | IGHV3- | IGHJ5 | 21 | 59 | 155 | 236 | 304 | 870 | 1197 |
| | 53 | | | | | | | | |
| set2_453 | IGHV3- | IGHJ4 | 2 | 39 | 135 | 216 | 304 | 871 | 1197 |
| | 30 | | | | | | | | |
| set2_454 | IGHV3- | IGHJ3 | 2 | 39 | 196 | 282 | 388 | 872 | 1198 |
| | 30 | | | | | | | | |
| set2_455 | IGHV3- | IGHJ4 | 2 | 38 | 135 | 216 | 304 | 873 | 1197 |
| | 30-3 | | | | | | | | |
| set2_456 | IGHV3- | IGHJ4 | 2 | 39 | 135 | 283 | 304 | 874 | 1197 |
| | 33 | | | | | | | | |
| set2_457 | IGHV3- | IGHJ4 | 2 | 38 | 135 | 216 | 304 | 875 | 1197 |
| | 30 | | | | | | | | |
| set2_458 | IGHV3- | IGHJ6 | 2 | 39 | 135 | 218 | 304 | 876 | 1196 |
| | 33 | | | | | | | | |
| set2_459 | IGHV3- | IGHJ6 | 2 | 38 | 135 | 216 | 304 | 877 | 1196 |
| | 30 | | | | | | | | |
| set2_460 | IGHV3- | IGHJ3 | 2 | 38 | 135 | 216 | 389 | 878 | 1197 |
| | 30 | | | | | | | | |
| set2_461 | IGHV3- | IGHJ3 | 2 | 38 | 135 | 216 | 304 | 879 | 1198 |
| | 30 | | | | | | | | |
| set2_462 | IGHV3- | IGHJ4 | 2 | 38 | 135 | 216 | 304 | 880 | 1197 |
| | 30 | | | | | | | | |
| set2_463 | IGHV3- | IGHJ4 | 2 | 38 | 135 | 216 | 304 | 881 | 1197 |
| | 30-3 | | | | | | | | |
| set2_464 | IGHV3- | IGHJ4 | 2 | 113 | 181 | 284 | 390 | 882 | 1197 |
| | 30-3 | | | | | | | | |
| set2_465 | IGHV3- | IGHJ6 | 2 | 38 | 135 | 216 | 304 | 883 | 1196 |
| | 30 | | | | | | | | |
| set2_466 | IGHV3- | IGHJ4 | 2 | 38 | 135 | 216 | 304 | 884 | 1197 |
| | 30 | | | | | | | | |
| set2_467 | IGHV3- | IGHJ4 | 34 | 38 | 197 | 285 | 391 | 885 | 1197 |
| | 30-3 | | | | | | | | |
| set2_468 | IGHV3- | IGHJ6 | 7 | 58 | 169 | 251 | 341 | 886 | 1196 |
| | 21 | | | | | | | | |
| set2_469 | IGHV3- | IGHJ3 | 2 | 111 | 193 | 216 | 304 | 887 | 1198 |
| | 30-3 | | | | | | | | |
| set2_470 | IGHV3- | IGHJ4 | 2 | 38 | 135 | 216 | 392 | 888 | 1197 |
| | 30 | | | | | | | | |
| set2_471 | IGHV3- | IGHJ4 | 2 | 39 | 135 | 216 | 304 | 889 | 1197 |
| | 30 | | | | | | | | |
| set2_472 | IGHV3- | IGHJ3 | 2 | 38 | 135 | 216 | 304 | 890 | 1198 |
| | 30 | | | | | | | | |
| set2_473 | IGHV1- | IGHJ4 | 30 | 98 | 184 | 267 | 364 | 891 | 1197 |
| | 24 | | | | | | | | |
| set2_474 | IGHV3- | IGHJ3 | 2 | 39 | 135 | 218 | 304 | 892 | 1198 |
| | 33 | | | | | | | | |
| set2_475 | IGHV3- | IGHJ6 | 2 | 39 | 135 | 216 | 304 | 893 | 1196 |
| | 30 | | | | | | | | |
| set2_476 | IGHV3- | IGHJ4 | 7 | 58 | 169 | 251 | 341 | 894 | 1197 |
| | 21 | | | | | | | | |
| set2_477 | IGHV3- | IGHJ4 | 6 | 114 | 139 | 286 | 393 | 895 | 1197 |
| | 74 | | | | | | | | |
| set2_478 | IGHV3- | IGHJ4 | 2 | 38 | 135 | 216 | 304 | 896 | 1197 |
| | 30 | | | | | | | | |
| set2_479 | IGHV3- | IGHJ4 | 21 | 59 | 155 | 236 | 304 | 897 | 1210 |
| | 53 | | | | | | | | |
| set2_480 | IGHV3- | IGHJ3 | 2 | 39 | 135 | 216 | 304 | 898 | 1198 |
| | 30 | | | | | | | | |
| set2_481 | IGHV3- | IGHJ6 | 21 | 115 | 183 | 236 | 304 | 899 | 1196 |
| | 66 | | | | | | | | |
| set2_482 | IGHV2- | IGHJ4 | 25 | 74 | 167 | 249 | 339 | 900 | 1202 |
| | 70 | | | | | | | | |
| set2_483 | IGHV3- | IGHJ2 | 6 | 106 | 190 | 280 | 378 | 901 | 1203 |
| | 13 | | | | | | | | |
| set2_484 | IGHV4- | IGHJ4 | 15 | 66 | 161 | 242 | 394 | 902 | 1197 |
| | 34 | | | | | | | | |
| set2_485 | IGHV3- | IGHJ4 | 7 | 58 | 169 | 251 | 341 | 903 | 1197 |
| | 21 | | | | | | | | |
| set2_486 | IGHV1- | IGHJ5 | 30 | 98 | 184 | 267 | 364 | 904 | 1197 |
| | 24 | | | | | | | | |
| set2_487 | IGHV3- | IGHJ4 | 7 | 58 | 169 | 251 | 341 | 905 | 1197 |
| | 21 | | | | | | | | |
| set2_488 | IGHV5- | IGHJ4 | 17 | 116 | 198 | 287 | 395 | 906 | 1197 |
| | 51 | | | | | | | | |
| set2_489 | IGHV1- | IGHJ5 | 30 | 98 | 184 | 267 | 364 | 907 | 1197 |
| | 24 | | | | | | | | |
| set2_490 | IGHV1- | IGHJ4 | 4 | 90 | 199 | 288 | 396 | 908 | 1197 |
| | 69 | | | | | | | | |
| set2_491 | IGHV3- | IGHJ4 | 2 | 39 | 135 | 216 | 304 | 909 | 1197 |
| | 30 | | | | | | | | |
| set2_492 | IGHV3- | IGHJ4 | 12 | 38 | 146 | 254 | 304 | 910 | 1197 |
| | 23 | | | | | | | | |
| set2_493 | IGHV3- | IGHJ4 | 7 | 58 | 169 | 251 | 341 | 911 | 1197 |
| | 21 | | | | | | | | |
| set2_494 | IGHV3- | IGHJ4 | 2 | 39 | 135 | 216 | 304 | 912 | 1197 |
| | 30 | | | | | | | | |
| set2_495 | IGHV3- | IGHJ6 | 2 | 39 | 135 | 218 | 304 | 913 | 1196 |
| | 33 | | | | | | | | |
| set2_496 | IGHV1- | IGHJ4 | 4 | 90 | 199 | 288 | 396 | 914 | 1197 |
| | 69 | | | | | | | | |
| set2_497 | IGHV3- | IGHJ4 | 7 | 58 | 169 | 251 | 341 | 915 | 1197 |
| | 21 | | | | | | | | |
| set2_498 | IGHV4- | IGHJ4 | 9 | 47 | 143 | 225 | 312 | 916 | 1197 |
| | 59 | | | | | | | | |
| set2_499 | IGHV3- | IGHJ5 | 2 | 39 | 135 | 218 | 304 | 917 | 1197 |
| | 33 | | | | | | | | |
| set2_500 | IGHV3- | IGHJ6 | 35 | 117 | 200 | 289 | 397 | 918 | 1196 |
| | 43 | | | | | | | | |
| set2_501 | IGHV3- | IGHJ5 | 7 | 58 | 169 | 251 | 341 | 919 | 1197 |
| | 21 | | | | | | | | |
| set2_502 | IGHV3- | IGHJ4 | 12 | 38 | 146 | 254 | 304 | 920 | 1197 |
| | 23 | | | | | | | | |
| set2_503 | IGHV3- | IGHJ4 | 12 | 38 | 146 | 254 | 304 | 921 | 1197 |
| | 23 | | | | | | | | |
| set2_504 | IGHV3- | IGHJ4 | 7 | 58 | 169 | 251 | 341 | 922 | 1197 |
| | 21 | | | | | | | | |
| set2_505 | IGHV3- | IGHJ4 | 2 | 39 | 135 | 216 | 304 | 923 | 1197 |
| | 30 | | | | | | | | |
| set2_506 | IGHV3- | IGHJ4 | 7 | 58 | 169 | 251 | 341 | 924 | 1197 |
| | 21 | | | | | | | | |
| set2_507 | IGHV1- | IGHJ4 | 14 | 84 | 148 | 230 | 351 | 925 | 1197 |
| | 2 | | | | | | | | |
| set2_508 | IGHV4- | IGHJ3 | 9 | 47 | 143 | 225 | 312 | 926 | 1198 |
| | 59 | | | | | | | | |
| set2_509 | IGHV3- | IGHJ3 | 2 | 39 | 135 | 218 | 304 | 927 | 1198 |
| | 33 | | | | | | | | |
| set2_510 | IGHV3- | IGHJ6 | 2 | 39 | 135 | 216 | 304 | 928 | 1196 |
| | 30 | | | | | | | | |
| set2_511 | IGHV1- | IGHJ6 | 14 | 76 | 170 | 252 | 342 | 929 | 1196 |
| | 46 | | | | | | | | |
| set2_512 | IGHV4- | IGHJ5 | 9 | 47 | 143 | 225 | 312 | 930 | 1197 |
| | 59 | | | | | | | | |
| set2_513 | IGHV4- | IGHJ6 | 15 | 66 | 161 | 242 | 312 | 931 | 1196 |
| | 34 | | | | | | | | |
| set2_514 | IGHV1- | IGHJ4 | 14 | 76 | 170 | 252 | 342 | 932 | 1197 |
| | 46 | | | | | | | | |
| set2_515 | IGHV2- | IGHJ4 | 24 | 72 | 166 | 290 | 336 | 933 | 1197 |
| | 5 | | | | | | | | |
| set2_516 | IGHV4- | IGHJ6 | 9 | 118 | 143 | 225 | 312 | 934 | 1200 |
| | 59 | | | | | | | | |
| set2_517 | IGHV3- | IGHJ6 | 18 | 92 | 158 | 238 | 361 | 935 | 1196 |
| | 9 | | | | | | | | |
| set2_518 | IGHV3- | IGHJ4 | 2 | 39 | 201 | 216 | 304 | 936 | 1197 |
| | 30 | | | | | | | | |
| set2_519 | IGHV3- | IGHJ4 | 2 | 39 | 135 | 218 | 304 | 937 | 1197 |
| | 33 | | | | | | | | |
| set2_520 | IGHV3- | IGHJ6 | 6 | 43 | 171 | 253 | 343 | 938 | 1196 |
| | 7 | | | | | | | | |
| set2_521 | IGHV3- | IGHJ5 | 20 | 65 | 186 | 272 | 341 | 939 | 1197 |
| | 11 | | | | | | | | |
| set2_522 | IGHV1- | IGHJ4 | 14 | 70 | 164 | 245 | 334 | 940 | 1197 |
| | 18 | | | | | | | | |
| set2_523 | IGHV3- | IGHJ5 | 12 | 38 | 146 | 254 | 304 | 941 | 1197 |
| | 23 | | | | | | | | |
| set2_524 | IGHV3- | IGHJ4 | 2 | 38 | 135 | 216 | 304 | 942 | 1197 |
| | 30 | | | | | | | | |
| set2_525 | IGHV3- | IGHJ5 | 2 | 39 | 135 | 216 | 304 | 943 | 1197 |
| | 30 | | | | | | | | |
| set2_526 | IGHV3- | IGHJ5 | 2 | 38 | 202 | 216 | 304 | 944 | 1197 |
| | 30-3 | | | | | | | | |
| set2_527 | IGHV1- | IGHJ6 | 4 | 119 | 179 | 261 | 357 | 945 | 1196 |
| | 69 | | | | | | | | |
| set2_528 | IGHV3- | IGHJ4 | 12 | 38 | 146 | 254 | 304 | 946 | 1197 |
| | 23 | | | | | | | | |
| set2_529 | IGHV3- | IGHJ4 | 7 | 58 | 169 | 251 | 341 | 947 | 1197 |
| | 21 | | | | | | | | |
| set2_530 | IGHV1- | IGHJ6 | 30 | 98 | 184 | 267 | 364 | 948 | 1196 |
| | 24 | | | | | | | | |
| set2_531 | IGHV3- | IGHJ5 | 18 | 92 | 158 | 238 | 361 | 949 | 1197 |
| | 9 | | | | | | | | |
| set2_532 | IGHV4- | IGHJ6 | 9 | 47 | 143 | 225 | 312 | 950 | 1196 |
| | 59 | | | | | | | | |
| set2_533 | IGHV3- | IGHJ4 | 2 | 39 | 135 | 218 | 304 | 951 | 1197 |
| | 33 | | | | | | | | |
| set2_534 | IGHV3- | IGHJ4 | 2 | 39 | 135 | 218 | 304 | 952 | 1197 |
| | 33 | | | | | | | | |
| set2_535 | IGHV1- | IGHJ5 | 30 | 98 | 184 | 267 | 364 | 953 | 1197 |
| | 24 | | | | | | | | |
| set2_536 | IGHV3- | IGHJ4 | 2 | 39 | 135 | 216 | 304 | 954 | 1197 |
| | 30 | | | | | | | | |
| set2_537 | IGHV3- | IGHJ6 | 7 | 58 | 169 | 251 | 341 | 955 | 1196 |
| | 21 | | | | | | | | |
| set2_538 | IGHV3- | IGHJ6 | 2 | 38 | 135 | 216 | 304 | 956 | 1196 |
| | 30-3 | | | | | | | | |
| set2_539 | IGHV3- | IGHJ4 | 2 | 39 | 135 | 218 | 304 | 957 | 1197 |
| | 33 | | | | | | | | |
| set2_540 | IGHV3- | IGHJ6 | 2 | 39 | 135 | 216 | 304 | 958 | 1200 |
| | 30 | | | | | | | | |
| set2_541 | IGHV1- | IGHJ6 | 14 | 84 | 148 | 230 | 351 | 959 | 1196 |
| | 2 | | | | | | | | |
| set2_542 | IGHV3- | IGHJ4 | 36 | 39 | 203 | 291 | 304 | 960 | 1197 |
| | 30 | | | | | | | | |
| set2_543 | IGHV3- | IGHJ4 | 2 | 39 | 135 | 216 | 304 | 961 | 1197 |
| | 30 | | | | | | | | |
| set2_544 | IGHV3- | IGHJ4 | 2 | 39 | 135 | 218 | 304 | 962 | 1197 |
| | 33 | | | | | | | | |
| set2_545 | IGHV3- | IGHJ5 | 2 | 39 | 135 | 218 | 304 | 963 | 1197 |
| | 33 | | | | | | | | |
| set2_546 | IGHV1- | IGHJ5 | 30 | 98 | 184 | 267 | 364 | 964 | 1197 |
| | 24 | | | | | | | | |
| set2_547 | IGHV3- | IGHJ4 | 2 | 38 | 135 | 216 | 304 | 965 | 1197 |
| | 30 | | | | | | | | |
| set2_548 | IGHV1- | IGHJ6 | 4 | 90 | 199 | 288 | 396 | 966 | 1196 |
| | 69 | | | | | | | | |
| set2_549 | IGHV3- | IGHJ3 | 21 | 59 | 155 | 236 | 304 | 967 | 1198 |
| | 53 | | | | | | | | |
| set2_550 | IGHV1- | IGHJ4 | 30 | 98 | 184 | 267 | 364 | 968 | 1197 |
| | 24 | | | | | | | | |
| set2_551 | IGHV1- | IGHJ4 | 4 | 90 | 179 | 261 | 357 | 969 | 1197 |
| | 69 | | | | | | | | |
| set2_552 | IGHV3- | IGHJ6 | 2 | 39 | 135 | 216 | 304 | 970 | 1196 |
| | 30 | | | | | | | | |
| set2_553 | IGHV4- | IGHJ4 | 9 | 47 | 143 | 225 | 312 | 971 | 1197 |
| | 59 | | | | | | | | |
| set2_554 | IGHV3- | IGHJ3 | 12 | 38 | 146 | 254 | 304 | 972 | 1198 |
| | 23 | | | | | | | | |
| set2_555 | IGHV3- | IGHJ4 | 2 | 39 | 135 | 218 | 304 | 973 | 1197 |
| | 33 | | | | | | | | |
| set2_556 | IGHV4- | IGHJ4 | 11 | 88 | 145 | 225 | 355 | 974 | 1197 |
| | 39 | | | | | | | | |
| set2_557 | IGHV3- | IGHJ4 | 6 | 106 | 190 | 277 | 378 | 975 | 1197 |
| | 13 | | | | | | | | |
| set2_558 | IGHV3- | IGHJ3 | 12 | 38 | 146 | 254 | 304 | 976 | 1198 |
| | 23 | | | | | | | | |
| set2_559 | IGHV1- | IGHJ4 | 14 | 76 | 170 | 252 | 342 | 977 | 1197 |
| | 46 | | | | | | | | |
| set2_560 | IGHV3- | IGHJ4 | 2 | 39 | 135 | 216 | 304 | 978 | 1197 |
| | 30 | | | | | | | | |
| set2_561 | IGHV1- | IGHJ3 | 31 | 100 | 185 | 270 | 367 | 979 | 1198 |
| | 58 | | | | | | | | |
| set2_562 | IGHV3- | IGHJ6 | 6 | 58 | 154 | 235 | 324 | 980 | 1196 |
| | 48 | | | | | | | | |
| set2_563 | IGHV3- | IGHJ6 | 2 | 39 | 135 | 218 | 304 | 981 | 1196 |
| | 33 | | | | | | | | |
| set2_564 | IGHV4- | IGHJ4 | 9 | 47 | 143 | 225 | 312 | 982 | 1197 |
| | 59 | | | | | | | | |
| set2_565 | IGHV4- | IGHJ4 | 8 | 109 | 194 | 225 | 355 | 983 | 1197 |
| | 31 | | | | | | | | |
| set2_566 | IGHV3- | IGHJ4 | 7 | 120 | 204 | 292 | 398 | 984 | 1216 |
| | 21 | | | | | | | | |
| set2_567 | IGHV1- | IGHJ5 | 30 | 98 | 184 | 267 | 364 | 985 | 1197 |
| | 24 | | | | | | | | |
| set2_568 | IGHV4- | IGHJ3 | 11 | 88 | 145 | 225 | 355 | 986 | 1198 |
| | 39 | | | | | | | | |
| set2_569 | IGHV3- | IGHJ6 | 6 | 106 | 190 | 277 | 378 | 987 | 1196 |
| | 13 | | | | | | | | |
| set2_570 | IGHV2- | IGHJ3 | 33 | 74 | 192 | 249 | 339 | 988 | 1198 |
| | 70 | | | | | | | | |
| set2_571 | IGHV2- | IGHJ3 | 24 | 72 | 166 | 247 | 336 | 989 | 1198 |
| | 5 | | | | | | | | |
| set2_572 | IGHV3- | IGHJ6 | 6 | 58 | 154 | 235 | 341 | 990 | 1196 |
| | 48 | | | | | | | | |
| set2_573 | IGHV4- | IGHJ3 | 8 | 109 | 194 | 225 | 355 | 991 | 1198 |
| | 31 | | | | | | | | |
| set2_574 | IGHV4- | IGHJ4 | 8 | 109 | 194 | 225 | 355 | 992 | 1197 |
| | 31 | | | | | | | | |
| set2_575 | IGHV4- | IGHJ6 | 11 | 88 | 145 | 225 | 355 | 993 | 1196 |
| | 39 | | | | | | | | |
| set2_576 | IGHV1- | IGHJ6 | 4 | 90 | 199 | 288 | 396 | 994 | 1196 |
| | 69 | | | | | | | | |
| set2_577 | IGHV1- | IGHJ6 | 4 | 90 | 199 | 288 | 396 | 995 | 1196 |
| | 69 | | | | | | | | |
| set2_578 | IGHV3- | IGHJ4 | 2 | 39 | 135 | 218 | 304 | 996 | 1197 |
| | 33 | | | | | | | | |
| set2_579 | IGHV1- | IGHJ4 | 30 | 98 | 184 | 267 | 364 | 997 | 1197 |
| | 24 | | | | | | | | |
| set2_580 | IGHV1- | IGHJ6 | 4 | 90 | 199 | 288 | 396 | 998 | 1200 |
| | 69 | | | | | | | | |
| set2_581 | IGHV2- | IGHJ5 | 24 | 72 | 166 | 247 | 336 | 999 | 1197 |
| | 5 | | | | | | | | |
| set2_582 | IGHV1- | IGHJ5 | 14 | 84 | 148 | 230 | 351 | 1000 | 1197 |
| | 2 | | | | | | | | |
| set2_583 | IGHV3- | IGHJ6 | 6 | 43 | 171 | 253 | 343 | 1001 | 1196 |
| | 7 | | | | | | | | |
| set2_584 | IGHV3- | IGHJ3 | 6 | 59 | 155 | 236 | 338 | 1002 | 1198 |
| | 53 | | | | | | | | |
| set2_585 | IGHV2- | IGHJ3 | 25 | 74 | 167 | 249 | 339 | 1003 | 1198 |
| | 70 | | | | | | | | |
| set2_586 | IGHV1- | IGHJ4 | 30 | 98 | 184 | 267 | 364 | 1004 | 1197 |
| | 24 | | | | | | | | |
| set2_587 | IGHV1- | IGHJ4 | 30 | 98 | 184 | 267 | 364 | 1005 | 1197 |
| | 24 | | | | | | | | |
| set2_588 | IGHV4- | IGHJ4 | 9 | 47 | 143 | 225 | 312 | 1006 | 1197 |
| | 59 | | | | | | | | |
| set2_589 | IGHV4- | IGHJ3 | 11 | 88 | 145 | 225 | 355 | 1007 | 1198 |
| | 39 | | | | | | | | |
| set2_590 | IGHV1- | IGHJ5 | 30 | 98 | 184 | 267 | 364 | 1008 | 1197 |
| | 24 | | | | | | | | |
| set2_591 | IGHV3- | IGHJ6 | 2 | 39 | 135 | 293 | 304 | 1009 | 1196 |
| | 30 | | | | | | | | |
| set2_592 | IGHV1- | IGHJ6 | 4 | 90 | 199 | 288 | 396 | 1010 | 1196 |
| | 69 | | | | | | | | |
| set2_593 | IGHV3- | IGHJ4 | 20 | 65 | 186 | 272 | 341 | 1011 | 1197 |
| | 11 | | | | | | | | |
| set2_594 | IGHV2- | IGHJ4 | 33 | 74 | 192 | 249 | 339 | 1012 | 1197 |
| | 70 | | | | | | | | |
| set2_595 | IGHV2- | IGHJ4 | 25 | 74 | 167 | 249 | 339 | 1013 | 1197 |
| | 70 | | | | | | | | |
| set2_596 | IGHV3- | IGHJ6 | 12 | 38 | 146 | 254 | 304 | 1014 | 1196 |
| | 23 | | | | | | | | |
| set2_597 | IGHV1- | IGHJ4 | 4 | 90 | 205 | 294 | 399 | 1015 | 1197 |
| | 69 | | | | | | | | |
| set2_598 | IGHV3- | IGHJ6 | 6 | 43 | 171 | 253 | 343 | 1016 | 1196 |
| | 7 | | | | | | | | |
| set2_599 | IGHV1- | IGHJ6 | 14 | 76 | 170 | 252 | 342 | 1017 | 1196 |
| | 46 | | | | | | | | |
| set2_600 | IGHV3- | IGHJ6 | 20 | 65 | 186 | 272 | 341 | 1018 | 1196 |
| | 11 | | | | | | | | |
| set2_601 | IGHV4- | IGHJI | 15 | 66 | 161 | 242 | 312 | 1019 | 1197 |
| | 34 | | | | | | | | |
| set2_602 | IGHV3- | IGHJ6 | 7 | 58 | 169 | 251 | 341 | 1020 | 1196 |
| | 21 | | | | | | | | |
| set2_603 | IGHV3- | IGHJ6 | 6 | 43 | 171 | 253 | 343 | 1021 | 1196 |
| | 7 | | | | | | | | |
| set2_604 | IGHV3- | IGHJ6 | 6 | 43 | 171 | 253 | 343 | 1022 | 1196 |
| | 7 | | | | | | | | |
| set2_605 | IGHV4- | IGHJ5 | 15 | 66 | 161 | 242 | 312 | 1023 | 1197 |
| | 34 | | | | | | | | |
| set2_606 | IGHV4- | IGHJ6 | 15 | 66 | 161 | 242 | 312 | 1024 | 1196 |
| | 34 | | | | | | | | |
| set2_607 | IGHV2- | IGHJ4 | 29 | 94 | 182 | 264 | 360 | 1025 | 1197 |
| | 26 | | | | | | | | |
| set2_608 | IGHV4- | IGHJ5 | 9 | 121 | 143 | 225 | 312 | 1026 | 1197 |
| | 59 | | | | | | | | |
| set2_609 | IGHV1- | IGHJ6 | 4 | 71 | 199 | 288 | 357 | 1027 | 1196 |
| | 69 | | | | | | | | |
| set2_610 | IGHV3- | IGHJ6 | 12 | 38 | 146 | 254 | 304 | 1028 | 1196 |
| | 23 | | | | | | | | |
| set2_611 | IGHV3- | IGHJ6 | 6 | 43 | 171 | 253 | 343 | 1029 | 1196 |
| | 7 | | | | | | | | |
| set2_612 | IGHV3- | IGHJ4 | 2 | 38 | 135 | 216 | 304 | 1030 | 1197 |
| | 30 | | | | | | | | |
| set2_613 | IGHV4- | IGHJ5 | 15 | 122 | 161 | 242 | 400 | 1031 | 1197 |
| | 34 | | | | | | | | |
| set2_614 | IGHV3- | IGHJ6 | 20 | 65 | 186 | 272 | 341 | 1032 | 1196 |
| | 11 | | | | | | | | |
| set2_615 | IGHV4- | IGHJ3 | 15 | 66 | 161 | 242 | 312 | 1033 | 1198 |
| | 34 | | | | | | | | |
| set2_616 | IGHV4- | IGHJ5 | 15 | 66 | 161 | 242 | 312 | 1034 | 1197 |
| | 34 | | | | | | | | |
| set2_617 | IGHV1- | IGHJ5 | 30 | 98 | 184 | 267 | 364 | 1035 | 1197 |
| | 24 | | | | | | | | |
| set2_618 | IGHV1- | IGHJ6 | 14 | 76 | 170 | 252 | 342 | 1036 | 1196 |
| | 46 | | | | | | | | |
| set2_619 | IGHV1- | IGHJ6 | 14 | 76 | 170 | 252 | 342 | 1037 | 1196 |
| | 46 | | | | | | | | |
| set2_620 | IGHV1- | IGHJ3 | 14 | 84 | 148 | 230 | 351 | 1038 | 1198 |
| | 2 | | | | | | | | |
| set2_621 | IGHV4- | IGHJ5 | 15 | 66 | 161 | 242 | 312 | 1039 | 1197 |
| | 34 | | | | | | | | |
| set2_622 | IGHV1- | IGHJ6 | 4 | 123 | 206 | 295 | 357 | 1040 | 1196 |
| | 69 | | | | | | | | |
| set2_623 | IGHV3- | IGHJ6 | 6 | 43 | 171 | 253 | 343 | 1041 | 1196 |
| | 7 | | | | | | | | |
| set2_624 | IGHV4- | IGHJ6 | 15 | 66 | 161 | 242 | 312 | 1042 | 1196 |
| | 34 | | | | | | | | |
| set2_625 | IGHV3- | IGHJ6 | 12 | 38 | 146 | 254 | 304 | 1043 | 1196 |
| | 23 | | | | | | | | |
| set2_626 | IGHV3- | IGHJ6 | 6 | 43 | 171 | 253 | 343 | 1044 | 1196 |
| | 7 | | | | | | | | |
| set2_627 | IGHV3- | IGHJ6 | 2 | 39 | 135 | 218 | 304 | 1045 | 1196 |
| | 33 | | | | | | | | |
| set2_628 | IGHV5- | IGHJ4 | 37 | 61 | 207 | 296 | 401 | 1046 | 1197 |
| | 10-1 | | | | | | | | |
| set2_629 | IGHV3- | IGHJ6 | 20 | 65 | 186 | 272 | 341 | 1047 | 1196 |
| | 11 | | | | | | | | |
| set2_630 | IGHV4- | IGHJ5 | 11 | 124 | 208 | 297 | 402 | 1048 | 1197 |
| | 39 | | | | | | | | |
| set2_631 | IGHV5- | IGHJ4 | 37 | 61 | 207 | 296 | 401 | 1049 | 1197 |
| | 10-1 | | | | | | | | |
| set2_632 | IGHV3- | IGHJ6 | 6 | 43 | 171 | 253 | 343 | 1050 | 1196 |
| | 7 | | | | | | | | |
| set2_633 | IGHV3- | IGHJ4 | 7 | 44 | 140 | 222 | 309 | 1051 | 1197 |
| | 15 | | | | | | | | |
| set2_634 | IGHV3- | IGHJ4 | 6 | 106 | 190 | 277 | 378 | 1052 | 1197 |
| | 13 | | | | | | | | |
| set2_635 | IGHV3- | IGHJ6 | 6 | 125 | 171 | 253 | 403 | 1053 | 1217 |
| | 7 | | | | | | | | |
| set2_636 | IGHV2- | IGHJ4 | 29 | 94 | 182 | 264 | 360 | 1054 | 1197 |
| | 26 | | | | | | | | |
| set2_637 | IGHV3- | IGHJ6 | 12 | 38 | 146 | 254 | 304 | 1055 | 1196 |
| | 23 | | | | | | | | |
| set2_638 | IGHV3- | IGHJ6 | 20 | 65 | 186 | 272 | 341 | 1056 | 1196 |
| | 11 | | | | | | | | |
| set2_639 | IGHV3- | IGHJ6 | 20 | 65 | 186 | 272 | 341 | 1057 | 1196 |
| | 11 | | | | | | | | |
| set2_640 | IGHV4- | IGHJ5 | 15 | 66 | 161 | 242 | 312 | 1058 | 1197 |
| | 34 | | | | | | | | |
| set2_641 | IGHV1- | IGHJ4 | 14 | 70 | 164 | 245 | 334 | 1059 | 1197 |
| | 18 | | | | | | | | |
| set2_642 | IGHV4- | IGHJ4 | 11 | 88 | 145 | 225 | 355 | 1060 | 1197 |
| | 39 | | | | | | | | |
| set2_643 | IGHV1- | IGHJ6 | 14 | 84 | 148 | 230 | 351 | 1061 | 1196 |
| | 2 | | | | | | | | |
| set2_644 | IGHV4- | IGHJ5 | 15 | 66 | 161 | 242 | 312 | 1062 | 1197 |
| | 34 | | | | | | | | |
| set2_645 | IGHV4- | IGHJ4 | 15 | 66 | 161 | 242 | 312 | 1063 | 1197 |
| | 34 | | | | | | | | |
| set2_646 | IGHV1- | IGHJ6 | 4 | 90 | 199 | 288 | 404 | 1064 | 1200 |
| | 69 | | | | | | | | |
| set2_647 | IGHV1- | IGHJ6 | 4 | 90 | 199 | 288 | 396 | 1065 | 1196 |
| | 69 | | | | | | | | |
| set2_648 | IGHV3- | IGHJ6 | 7 | 58 | 169 | 251 | 341 | 1066 | 1196 |
| | 21 | | | | | | | | |
| set2_649 | IGHV4- | IGHJ6 | 15 | 66 | 161 | 242 | 405 | 1067 | 1196 |
| | 34 | | | | | | | | |
| set2_650 | IGHV3- | IGHJ6 | 2 | 39 | 135 | 218 | 304 | 1068 | 1196 |
| | 33 | | | | | | | | |
| set2_651 | IGHV3- | IGHJ4 | 7 | 58 | 169 | 251 | 341 | 1069 | 1197 |
| | 21 | | | | | | | | |
| set2_652 | IGHV5- | IGHJ5 | 37 | 61 | 207 | 296 | 401 | 1070 | 1197 |
| | 10-1 | | | | | | | | |
| set2_653 | IGHV3- | IGHJ6 | 6 | 43 | 171 | 253 | 343 | 1071 | 1196 |
| | 7 | | | | | | | | |
| set2_654 | IGHV1- | IGHJ6 | 4 | 90 | 199 | 261 | 357 | 1072 | 1196 |
| | 69 | | | | | | | | |
| set2_655 | IGHV3- | IGHJ4 | 2 | 39 | 135 | 216 | 304 | 1073 | 1197 |
| | 30 | | | | | | | | |
| set2_656 | IGHV3- | IGHJ4 | 7 | 58 | 169 | 251 | 341 | 1074 | 1197 |
| | 21 | | | | | | | | |
| set2_657 | IGHV3- | IGHJ6 | 6 | 43 | 171 | 253 | 343 | 1075 | 1196 |
| | 7 | | | | | | | | |
| set2_658 | IGHV4- | IGHJ6 | 15 | 66 | 209 | 298 | 406 | 1076 | 1196 |
| | 34 | | | | | | | | |
| set2_659 | IGHV3- | IGHJ4 | 2 | 39 | 135 | 216 | 304 | 1077 | 1197 |
| | 30 | | | | | | | | |
| set2_660 | IGHV1- | IGHJ6 | 4 | 90 | 199 | 288 | 396 | 1078 | 1200 |
| | 69 | | | | | | | | |
| set2_661 | IGHV4- | IGHJ3 | 15 | 66 | 161 | 242 | 312 | 1079 | 1198 |
| | 34 | | | | | | | | |
| set2_662 | IGHV3- | IGHJ6 | 12 | 38 | 146 | 254 | 304 | 1080 | 1196 |
| | 23 | | | | | | | | |
| set2_663 | IGHV1- | IGHJ6 | 4 | 90 | 199 | 288 | 396 | 1081 | 1196 |
| | 69 | | | | | | | | |
| set2_664 | IGHV3- | IGHJ4 | 2 | 39 | 135 | 216 | 304 | 1082 | 1197 |
| | 30 | | | | | | | | |
| set2_665 | IGHV3- | IGHJ6 | 12 | 38 | 146 | 254 | 304 | 1083 | 1196 |
| | 23 | | | | | | | | |
| set2_666 | IGHV1- | IGHJ5 | 30 | 98 | 184 | 267 | 364 | 1084 | 1197 |
| | 24 | | | | | | | | |
| set2_667 | IGHV3- | IGHJ3 | 7 | 44 | 140 | 222 | 309 | 1085 | 1198 |
| | 15 | | | | | | | | |
| set2_668 | IGHV4- | IGHJ5 | 11 | 88 | 145 | 225 | 355 | 1086 | 1197 |
| | 39 | | | | | | | | |
| set2_669 | IGHV4- | IGHJ3 | 9 | 126 | 210 | 225 | 407 | 1087 | 1198 |
| | 59 | | | | | | | | |
| set2_670 | IGHV4- | IGHJ6 | 15 | 66 | 161 | 242 | 312 | 1088 | 1196 |
| | 34 | | | | | | | | |
| set2_671 | IGHV4- | IGHJ5 | 9 | 47 | 143 | 225 | 312 | 1089 | 1197 |
| | 59 | | | | | | | | |
| set2_672 | IGHV4- | IGHJ5 | 15 | 66 | 161 | 242 | 312 | 1090 | 1197 |
| | 34 | | | | | | | | |
| set2_673 | IGHV1- | IGHJ5 | 30 | 98 | 184 | 267 | 364 | 1091 | 1197 |
| | 24 | | | | | | | | |
| set2_674 | IGHV4- | IGHJ4 | 11 | 88 | 145 | 225 | 355 | 1092 | 1197 |
| | 39 | | | | | | | | |
| set2_675 | IGHV4- | IGHJ3 | 9 | 47 | 143 | 299 | 312 | 1093 | 1198 |
| | 59 | | | | | | | | |
| set2_676 | IGHV4- | IGHJ6 | 9 | 47 | 211 | 225 | 408 | 1094 | 1218 |
| | 59 | | | | | | | | |
| set2_677 | IGHV1- | IGHJ6 | 14 | 70 | 164 | 245 | 334 | 1095 | 1196 |
| | 18 | | | | | | | | |
| set2_678 | IGHV2- | IGHJ4 | 29 | 94 | 182 | 264 | 360 | 1096 | 1197 |
| | 26 | | | | | | | | |
| set2_679 | IGHV3- | IGHJ6 | 12 | 38 | 146 | 254 | 304 | 1097 | 1196 |
| | 23 | | | | | | | | |
| set2_680 | IGHV1- | IGHJ6 | 4 | 90 | 199 | 288 | 396 | 1098 | 1200 |
| | 69 | | | | | | | | |
| set2_681 | IGHV4- | IGHJ3 | 9 | 47 | 175 | 256 | 347 | 1099 | 1198 |
| | 4 | | | | | | | | |
| set2_682 | IGHV3- | IGHJ3 | 7 | 44 | 140 | 222 | 309 | 1100 | 1198 |
| | 15 | | | | | | | | |
| set2_683 | IGHV1- | IGHJ6 | 14 | 84 | 148 | 230 | 351 | 1101 | 1196 |
| | 2 | | | | | | | | |
| set2_684 | IGHV3- | IGHJ4 | 2 | 39 | 135 | 216 | 304 | 1102 | 1197 |
| | 30 | | | | | | | | |
| set2_685 | IGHV1- | IGHJ6 | 4 | 90 | 199 | 288 | 396 | 1103 | 1200 |
| | 69 | | | | | | | | |
| set2_686 | IGHV4- | IGHJ5 | 8 | 109 | 194 | 225 | 355 | 1104 | 1197 |
| | 31 | | | | | | | | |
| set2_687 | IGHV3- | IGHJ5 | 6 | 127 | 139 | 300 | 308 | 1105 | 1197 |
| | 74 | | | | | | | | |
| set2_688 | IGHV1- | IGHJ5 | 30 | 98 | 184 | 267 | 364 | 1106 | 1197 |
| | 24 | | | | | | | | |
| set2_689 | IGHV1- | IGHJ5 | 4 | 128 | 199 | 288 | 396 | 1107 | 1197 |
| | 69 | | | | | | | | |
| set2_690 | IGHV5- | IGHJ4 | 17 | 61 | 157 | 229 | 326 | 1108 | 1197 |
| | 51 | | | | | | | | |
| set2_691 | IGHV1- | IGHJ6 | 14 | 70 | 164 | 245 | 334 | 1109 | 1196 |
| | 18 | | | | | | | | |
| set2_692 | IGHV1- | IGHJ5 | 14 | 70 | 164 | 245 | 334 | 1110 | 1197 |
| | 18 | | | | | | | | |
| set2_693 | IGHV3- | IGHJ6 | 20 | 65 | 186 | 272 | 341 | 1111 | 1196 |
| | 11 | | | | | | | | |
| set2_694 | IGHV3- | IGHJ6 | 12 | 38 | 146 | 254 | 304 | 1112 | 1196 |
| | 23 | | | | | | | | |
| set2_695 | IGHV3- | IGHJ6 | 6 | 43 | 171 | 253 | 343 | 1113 | 1196 |
| | 7 | | | | | | | | |
| set2_696 | IGHV3- | IGHJ6 | 12 | 38 | 146 | 254 | 304 | 1114 | 1196 |
| | 23 | | | | | | | | |
| set2_697 | IGHV5- | IGHJ5 | 17 | 61 | 157 | 229 | 326 | 1115 | 1197 |
| | 51 | | | | | | | | |
| set2_698 | IGHV3- | IGHJ6 | 2 | 39 | 141 | 301 | 409 | 1116 | 1196 |
| | 30 | | | | | | | | |
| set2_699 | IGHV4- | IGHJ3 | 11 | 88 | 145 | 225 | 410 | 1117 | 1198 |
| | 39 | | | | | | | | |
| set2_700 | IGHV3- | IGHJ6 | 6 | 43 | 171 | 253 | 343 | 1118 | 1196 |
| | 7 | | | | | | | | |
| set2_701 | IGHV4- | IGHJ4 | 15 | 66 | 161 | 242 | 312 | 1119 | 1197 |
| | 34 | | | | | | | | |
| set2_702 | IGHV1- | IGHJ6 | 4 | 90 | 199 | 288 | 396 | 1120 | 1196 |
| | 69 | | | | | | | | |
| set2_703 | IGHV4- | IGHJ5 | 11 | 88 | 145 | 225 | 355 | 1121 | 1197 |
| | 39 | | | | | | | | |
| set2_704 | IGHV3- | IGHJ6 | 6 | 43 | 171 | 253 | 343 | 1122 | 1196 |
| | 7 | | | | | | | | |
| set2_705 | IGHV4- | IGHJ6 | 9 | 47 | 143 | 225 | 312 | 1123 | 1196 |
| | 59 | | | | | | | | |
| set2_706 | IGHV3- | IGHJ6 | 20 | 65 | 186 | 272 | 341 | 1124 | 1196 |
| | 11 | | | | | | | | |
| set2_707 | IGHV4- | IGHJ4 | 15 | 66 | 161 | 242 | 312 | 1125 | 1197 |
| | 34 | | | | | | | | |
| set2_708 | IGHV1- | IGHJ6 | 4 | 90 | 199 | 288 | 396 | 1126 | 1200 |
| | 69 | | | | | | | | |
| set2_709 | IGHV1- | IGHJ6 | 4 | 90 | 199 | 288 | 396 | 1127 | 1196 |
| | 69 | | | | | | | | |
| set2_710 | IGHV3- | IGHJ3 | 6 | 129 | 212 | 302 | 411 | 1128 | 1198 |
| | 7 | | | | | | | | |
| set2_711 | IGHV4- | IGHJ6 | 11 | 88 | 145 | 225 | 355 | 1129 | 1196 |
| | 39 | | | | | | | | |
| set2_712 | IGHV4- | IGHJ6 | 15 | 66 | 161 | 242 | 312 | 1130 | 1196 |
| | 34 | | | | | | | | |
| set2_713 | IGHV1- | IGHJ3 | 14 | 84 | 148 | 230 | 351 | 1131 | 1198 |
| | 2 | | | | | | | | |
| set2_714 | IGHV3- | IGHJ4 | 2 | 39 | 135 | 216 | 304 | 1132 | 1197 |
| | 30 | | | | | | | | |
| set2_715 | IGHV4- | IGHJ6 | 8 | 109 | 194 | 225 | 355 | 1133 | 1196 |
| | 31 | | | | | | | | |
| set2_716 | IGHV4- | IGHJ6 | 11 | 88 | 145 | 225 | 355 | 1134 | 1196 |
| | 39 | | | | | | | | |
| set2_717 | IGHV3- | IGHJ6 | 7 | 58 | 169 | 251 | 341 | 1135 | 1200 |
| | 21 | | | | | | | | |
| set2_718 | IGHV3- | IGHJ3 | 12 | 130 | 213 | 303 | 412 | 1136 | 1196 |
| | 23 | | | | | | | | |
| set2_719 | IGHV3- | IGHJ6 | 6 | 106 | 190 | 280 | 378 | 1137 | 1200 |
| | 13 | | | | | | | | |
| set2_720 | IGHV4- | IGHJ3 | 9 | 131 | 143 | 225 | 312 | 1138 | 1198 |
| | 61 | | | | | | | | |
| set2_721 | IGHV3- | IGHJ4 | 7 | 44 | 140 | 222 | 309 | 1139 | 1197 |
| | 15 | | | | | | | | |
| set2_722 | IGHV2- | IGHJ6 | 33 | 74 | 192 | 249 | 339 | 1140 | 1196 |
| | 70 | | | | | | | | |
| set2_723 | IGHV4- | IGHJ6 | 15 | 66 | 161 | 242 | 312 | 1141 | 1196 |
| | 34 | | | | | | | | |
| set2_724 | IGHV3- | IGHJ6 | 20 | 65 | 186 | 272 | 341 | 1142 | 1196 |
| | 11 | | | | | | | | |
| set2_725 | IGHV4- | IGHJ6 | 9 | 47 | 143 | 225 | 312 | 1143 | 1196 |
| | 59 | | | | | | | | |
| set2_726 | IGHV3- | IGHJ4 | 2 | 39 | 135 | 218 | 304 | 1144 | 1197 |
| | 33 | | | | | | | | |
| set2_727 | IGHV1- | IGHJ6 | 30 | 98 | 184 | 267 | 364 | 1145 | 1196 |
| | 24 | | | | | | | | |
| set2_728 | IGHV3- | IGHJ5 | 20 | 65 | 186 | 272 | 341 | 1146 | 1197 |
| | 11 | | | | | | | | |
| set2_729 | IGHV3- | IGHJ2 | 6 | 106 | 190 | 277 | 378 | 1147 | 1203 |
| | 13 | | | | | | | | |
| set2_730 | IGHV4- | IGHJ6 | 15 | 66 | 161 | 242 | 312 | 1148 | 1196 |
| | 34 | | | | | | | | |
| set2_731 | IGHV1- | IGHJ6 | 14 | 70 | 164 | 245 | 334 | 1149 | 1196 |
| | 18 | | | | | | | | |
| set2_732 | IGHV3- | IGHJ6 | 2 | 39 | 181 | 216 | 304 | 1150 | 1196 |
| | 30 | | | | | | | | |
| set2_733 | IGHV4- | IGHJ6 | 15 | 66 | 161 | 242 | 312 | 1151 | 1196 |
| | 34 | | | | | | | | |
| set2_734 | IGHV3- | IGHJ6 | 6 | 43 | 171 | 253 | 343 | 1152 | 1196 |
| | 7 | | | | | | | | |
| set2_735 | IGHV4- | IGHJ5 | 11 | 88 | 145 | 225 | 355 | 1153 | 1197 |
| | 39 | | | | | | | | |
| set2_736 | IGHV1- | IGHJ4 | 14 | 70 | 164 | 245 | 334 | 1154 | 1197 |
| | 18 | | | | | | | | |
| set2_737 | IGHV3- | IGHJ3 | 6 | 132 | 214 | 221 | 413 | 1155 | 1198 |
| | 74 | | | | | | | | |
| set2_738 | IGHV4- | IGHJ5 | 9 | 47 | 143 | 225 | 312 | 1156 | 1197 |
| | 59 | | | | | | | | |
| set2_739 | IGHV4- | IGHJ6 | 11 | 88 | 145 | 225 | 355 | 1157 | 1196 |
| | 39 | | | | | | | | |
| set2_740 | IGHV3- | IGHJ4 | 2 | 39 | 135 | 216 | 304 | 1158 | 1197 |
| | 30 | | | | | | | | |
| set2_741 | IGHV1- | IGHJ6 | 14 | 70 | 164 | 245 | 334 | 1159 | 1196 |
| | 18 | | | | | | | | |
| set2_742 | IGHV3- | IGHJ6 | 20 | 65 | 186 | 272 | 341 | 1160 | 1196 |
| | 11 | | | | | | | | |
| set2_743 | IGHV3- | IGHJ6 | 6 | 43 | 171 | 253 | 343 | 1161 | 1196 |
| | 7 | | | | | | | | |
| set2_744 | IGHV3- | IGHJ6 | 6 | 43 | 171 | 253 | 343 | 1162 | 1196 |
| | 7 | | | | | | | | |
| set2_745 | IGHV1- | IGHJ6 | 14 | 70 | 164 | 245 | 334 | 1163 | 1196 |
| | 18 | | | | | | | | |
| set2_746 | IGHV1- | IGHJ6 | 14 | 70 | 164 | 245 | 334 | 1164 | 1196 |
| | 18 | | | | | | | | |
| set2_747 | IGHV1- | IGHJ6 | 30 | 98 | 184 | 267 | 364 | 1165 | 1196 |
| | 24 | | | | | | | | |
| set2_748 | IGHV4- | IGHJ6 | 15 | 66 | 161 | 242 | 312 | 1166 | 1196 |
| | 34 | | | | | | | | |
| set2_749 | IGHV1- | IGHJ6 | 14 | 70 | 164 | 245 | 334 | 1167 | 1196 |
| | 18 | | | | | | | | |
| set2_750 | IGHV1- | IGHJ6 | 4 | 90 | 199 | 288 | 396 | 1168 | 1196 |
| | 69 | | | | | | | | |
| set2_751 | IGHV3- | IGHJ6 | 6 | 43 | 171 | 253 | 343 | 1169 | 1196 |
| | 7 | | | | | | | | |
| set2_752 | IGHV1- | IGHJ6 | 4 | 90 | 199 | 288 | 396 | 1170 | 1196 |
| | 69 | | | | | | | | |
| set2_753 | IGHV3- | IGHJ4 | 2 | 133 | 135 | 216 | 414 | 1171 | 1197 |
| | 30 | | | | | | | | |
| set2_754 | IGHV3- | IGHJ3 | 7 | 58 | 169 | 251 | 341 | 1172 | 1198 |
| | 21 | | | | | | | | |
| set2_755 | IGHV3- | IGHJ6 | 2 | 39 | 135 | 218 | 304 | 1173 | 1196 |
| | 33 | | | | | | | | |
| set2_756 | IGHV3- | IGHJ6 | 6 | 43 | 171 | 253 | 343 | 1174 | 1196 |
| | 7 | | | | | | | | |
| set2_757 | IGHV1- | IGHJ6 | 14 | 70 | 164 | 245 | 334 | 1175 | 1196 |
| | 18 | | | | | | | | |
| set2_758 | IGHV3- | IGHJ4 | 6 | 43 | 171 | 253 | 343 | 1176 | 1197 |
| | 7 | | | | | | | | |
| set2_759 | IGHV1- | IGHJ6 | 14 | 84 | 148 | 230 | 351 | 1177 | 1196 |
| | 2 | | | | | | | | |
| set2_760 | IGHV3- | IGHJ6 | 7 | 58 | 169 | 251 | 341 | 1178 | 1196 |
| | 21 | | | | | | | | |
| set2_761 | IGHV4- | IGHJ6 | 15 | 66 | 161 | 242 | 312 | 1179 | 1196 |
| | 34 | | | | | | | | |
| set2_762 | IGHV1- | IGHJ6 | 14 | 70 | 164 | 245 | 334 | 1180 | 1196 |
| | 18 | | | | | | | | |
| set2_763 | IGHV3- | IGHJ6 | 20 | 65 | 186 | 272 | 341 | 1181 | 1196 |
| | 11 | | | | | | | | |
| set2_764 | IGHV4- | IGHJ6 | 9 | 47 | 175 | 256 | 347 | 1182 | 1196 |
| | 4 | | | | | | | | |
| set2_765 | IGHV4- | IGHJ6 | 15 | 66 | 161 | 242 | 312 | 1183 | 1196 |
| | 34 | | | | | | | | |
| set2_766 | IGHV1- | IGHJ6 | 14 | 70 | 164 | 245 | 334 | 1184 | 1196 |
| | 18 | | | | | | | | |
| set2_767 | IGHV1- | IGHJ6 | 14 | 70 | 164 | 245 | 334 | 1185 | 1196 |
| | 18 | | | | | | | | |
| set2_768 | IGHV4- | IGHJ6 | 15 | 134 | 161 | 242 | 312 | 1186 | 1196 |
| | 34 | | | | | | | | |
| set2_769 | IGHV1- | IGHJ6 | 14 | 70 | 164 | 245 | 334 | 1187 | 1196 |
| | 18 | | | | | | | | |
| set2_770 | IGHV1- | IGHJ6 | 14 | 70 | 215 | 245 | 415 | 1188 | 1196 |
| | 18 | | | | | | | | |
| set2_771 | IGHV3- | IGHJ6 | 2 | 39 | 135 | 218 | 304 | 1189 | 1196 |
| | 33 | | | | | | | | |
| set2_772 | IGHV3- | IGHJ6 | 2 | 38 | 135 | 216 | 304 | 1190 | 1200 |
| | 30 | | | | | | | | |
| set2_773 | IGHV3- | IGHJ6 | 2 | 39 | 135 | 218 | 304 | 1191 | 1196 |
| | 33 | | | | | | | | |
| set2_774 | IGHV3- | IGHJ6 | 2 | 38 | 135 | 216 | 304 | 1192 | 1196 |
| | 30 | | | | | | | | |
| set2_775 | IGHV3- | IGHJ6 | 2 | 39 | 135 | 218 | 304 | 1193 | 1196 |
| | 33 | | | | | | | | |
| set2_776 | IGHV3- | IGHJ6 | 2 | 39 | 135 | 218 | 304 | 1194 | 1196 |
| | 33 | | | | | | | | |
| set2_777 | IGHV3- | IGHJ6 | 2 | 39 | 135 | 218 | 304 | 1195 | 1196 |
| | 33 | | | | | | | | |

TABLE 2
Polypeptide sequences of immunoglobulin
heavy chain variable domains (VHs)

| | Polypeptide sequence |
|---|---|
| VH name | (SEQ ID NO) |
| set1_1 | 1 |
| set1_2 | 1219 |
| set1_3 | 1220 |
| set1_4 | 1221 |
| set1_5 | 1222 |
| set2_1 | 1223 |
| set2_2 | 1224 |
| set2_3 | 1225 |
| set2_4 | 1226 |
| set2_5 | 1227 |
| set2_6 | 1228 |
| set2_7 | 1229 |
| set2_8 | 1230 |
| set2_9 | 1231 |
| set2_10 | 1232 |
| set2_11 | 1233 |
| set2_12 | 1234 |
| set2_13 | 1235 |
| set2_14 | 1236 |
| set2_15 | 1237 |
| set2_16 | 1238 |
| set2_17 | 1239 |
| set2_18 | 1240 |
| set2_19 | 1241 |
| set2_20 | 1242 |
| set2_21 | 1243 |
| set2_22 | 1244 |
| set2_23 | 1245 |
| set2_24 | 1246 |
| set2_25 | 1247 |
| set2_26 | 1248 |
| set2_27 | 1249 |
| set2_28 | 1250 |
| set2_29 | 1251 |
| set2_30 | 1252 |
| set2_31 | 1253 |
| set2_32 | 1254 |
| set2_33 | 1255 |
| set2_34 | 1256 |
| set2_35 | 1257 |
| set2_36 | 1258 |
| set2_37 | 1259 |
| set2_38 | 1260 |
| set2_39 | 1261 |
| set2_40 | 1262 |
| set2_41 | 1263 |
| set2_42 | 1264 |
| set2_43 | 1265 |
| set2_44 | 1266 |
| set2_45 | 1267 |
| set2_46 | 1268 |
| set2_47 | 1269 |
| set2_48 | 1270 |
| set2_49 | 1271 |
| set2_50 | 1272 |
| set2_51 | 1273 |
| set2_52 | 1274 |
| set2_53 | 1275 |
| set2_54 | 1276 |
| set2_55 | 1277 |
| set2_56 | 1278 |
| set2_57 | 1279 |
| set2_58 | 1280 |
| set2_59 | 1281 |
| set2_60 | 1282 |
| set2_61 | 1283 |
| set2_62 | 1284 |
| set2_63 | 1285 |
| set2_64 | 1286 |
| set2_65 | 1287 |
| set2_66 | 1288 |
| set2_67 | 1289 |
| set2_68 | 1290 |
| set2_69 | 1291 |
| set2_70 | 1292 |
| set2_71 | 1293 |
| set2_72 | 1294 |
| set2_73 | 1295 |
| set2_74 | 1296 |
| set2_75 | 1297 |
| set2_76 | 1298 |
| set2_77 | 1299 |
| set2_78 | 1300 |
| set2_79 | 1301 |
| set2_80 | 1302 |
| set2_81 | 1303 |
| set2_82 | 1304 |
| set2_83 | 1305 |
| set2_84 | 1306 |
| set2_85 | 1307 |
| set2_86 | 1308 |
| set2_87 | 1309 |
| set2_88 | 1310 |
| set2_89 | 1311 |
| set2_90 | 1312 |
| set2_91 | 1313 |
| set2_92 | 1314 |
| set2_93 | 1315 |
| set2_94 | 1316 |
| set2_95 | 1317 |
| set2_96 | 1318 |
| set2_97 | 1319 |
| set2_98 | 1320 |
| set2_99 | 1321 |
| set2_100 | 1322 |
| set2_101 | 1323 |
| set2_102 | 1324 |
| set2_103 | 1325 |
| set2_104 | 1326 |
| set2_105 | 1327 |
| set2_106 | 1328 |
| set2_107 | 1329 |
| set2_108 | 1330 |
| set2_109 | 1331 |
| set2_110 | 1332 |
| set2_111 | 1333 |
| set2_112 | 1334 |
| set2_113 | 1335 |
| set2_114 | 1336 |
| set2_115 | 1337 |
| set2_116 | 1338 |
| set2_117 | 1339 |
| set2_118 | 1340 |
| set2_119 | 1341 |
| set2_120 | 1342 |
| set2_121 | 1343 |
| set2_122 | 1344 |
| set2_123 | 1345 |
| set2_124 | 1346 |
| set2_125 | 1347 |
| set2_126 | 1348 |
| set2_127 | 1349 |
| set2_128 | 1350 |
| set2_129 | 1351 |
| set2_130 | 1352 |
| set2_131 | 1353 |
| set2_132 | 1354 |
| set2_133 | 1355 |
| set2_134 | 1356 |
| set2_135 | 1357 |
| set2_136 | 1358 |
| set2_137 | 1359 |
| set2_138 | 1360 |
| set2_139 | 1361 |
| set2_140 | 1362 |
| set2_141 | 1363 |
| set2_142 | 1364 |
| set2_143 | 1365 |
| set2_144 | 1366 |
| set2_145 | 1367 |
| set2_146 | 1368 |
| set2_147 | 1369 |
| set2_148 | 1370 |
| set2_149 | 1371 |
| set2_150 | 1372 |
| set2_151 | 1373 |
| set2_152 | 1374 |
| set2_153 | 1375 |
| set2_154 | 1376 |
| set2_155 | 1377 |
| set2_156 | 1378 |
| set2_157 | 1379 |
| set2_158 | 1380 |
| set2_159 | 1381 |
| set2_160 | 1382 |
| set2_161 | 1383 |
| set2_162 | 1384 |
| set2_163 | 1385 |
| set2_164 | 1386 |
| set2_165 | 1387 |
| set2_166 | 1388 |
| set2_167 | 1389 |
| set2_168 | 1390 |
| set2_169 | 1391 |
| set2_170 | 1392 |
| set2_171 | 1393 |
| set2_172 | 1394 |
| set2_173 | 1395 |
| set2_174 | 1396 |
| set2_175 | 1397 |
| set2_176 | 1398 |
| set2_177 | 1399 |
| set2_178 | 1400 |
| set2_179 | 1401 |
| set2_180 | 1402 |
| set2_181 | 1403 |
| set2_182 | 1404 |
| set2_183 | 1405 |
| set2_184 | 1406 |
| set2_185 | 1407 |
| set2_186 | 1408 |
| set2_187 | 1409 |
| set2_188 | 1410 |
| set2_189 | 1411 |
| set2_190 | 1412 |
| set2_191 | 1413 |
| set2_192 | 1414 |
| set2_193 | 1415 |
| set2_194 | 1416 |
| set2_195 | 1417 |
| set2_196 | 1418 |
| set2_197 | 1419 |
| set2_198 | 1420 |
| set2_199 | 1421 |
| set2_200 | 1422 |
| set2_201 | 1423 |
| set2_202 | 1424 |
| set2_203 | 1425 |
| set2_204 | 1426 |
| set2_205 | 1427 |
| set2_206 | 1428 |
| set2_207 | 1429 |
| set2_208 | 1430 |
| set2_209 | 1431 |
| set2_210 | 1432 |
| set2_211 | 1433 |
| set2_212 | 1434 |
| set2_213 | 1435 |
| set2_214 | 1436 |
| set2_215 | 1437 |
| set2_216 | 1438 |
| set2_217 | 1439 |
| set2_218 | 1440 |
| set2_219 | 1441 |
| set2_220 | 1442 |
| set2_221 | 1443 |
| set2_222 | 1444 |
| set2_223 | 1445 |
| set2_224 | 1446 |
| set2_225 | 1447 |
| set2_226 | 1448 |
| set2_227 | 1449 |
| set2_228 | 1450 |
| set2_229 | 1451 |
| set2_230 | 1452 |
| set2_231 | 1453 |
| set2_232 | 1454 |
| set2_233 | 1455 |
| set2_234 | 1456 |
| set2_235 | 1457 |
| set2_236 | 1458 |
| set2_237 | 1459 |
| set2_238 | 1460 |
| set2_239 | 1461 |
| set2_240 | 1462 |
| set2_241 | 1463 |
| set2_242 | 1464 |
| set2_243 | 1465 |
| set2_244 | 1466 |
| set2_245 | 1467 |
| set2_246 | 1468 |
| set2_247 | 1469 |
| set2_248 | 1470 |
| set2_249 | 1471 |
| set2_250 | 1472 |
| set2_251 | 1473 |
| set2_252 | 1474 |
| set2_253 | 1475 |
| set2_254 | 1476 |
| set2_255 | 1477 |
| set2_256 | 1478 |
| set2_257 | 1479 |
| set2_258 | 1480 |
| set2_259 | 1481 |
| set2_260 | 1482 |
| set2_261 | 1483 |
| set2_262 | 1484 |
| set2_263 | 1485 |
| set2_264 | 1486 |
| set2_265 | 1487 |
| set2_266 | 1488 |
| set2_267 | 1489 |
| set2_268 | 1490 |
| set2_269 | 1491 |
| set2_270 | 1492 |
| set2_271 | 1493 |
| set2_272 | 1474 |
| set2_273 | 1494 |
| set2_274 | 1495 |
| set2_275 | 1496 |
| set2_276 | 1497 |
| set2_277 | 1498 |
| set2_278 | 1499 |
| set2_279 | 1500 |
| set2_280 | 1501 |
| set2_281 | 1502 |
| set2_282 | 1503 |
| set2_283 | 1504 |
| set2_284 | 1505 |
| set2_285 | 1506 |
| set2_286 | 1507 |
| set2_287 | 1508 |
| set2_288 | 1509 |
| set2_289 | 1510 |
| set2_290 | 1511 |
| set2_291 | 1512 |
| set2_292 | 1513 |
| set2_293 | 1514 |
| set2_294 | 1515 |
| set2_295 | 1516 |
| set2_296 | 1517 |
| set2_297 | 1518 |
| set2_298 | 1519 |
| set2_299 | 1520 |
| set2_300 | 1521 |
| set2_301 | 1522 |
| set2_302 | 1523 |
| set2_303 | 1524 |
| set2_304 | 1525 |
| set2_305 | 1526 |
| set2_306 | 1527 |
| set2_307 | 1528 |
| set2_308 | 1529 |
| set2_309 | 1530 |
| set2_310 | 1531 |
| set2_311 | 1532 |
| set2_312 | 1533 |
| set2_313 | 1534 |
| set2_314 | 1535 |
| set2_315 | 1536 |
| set2_316 | 1537 |
| set2_317 | 1538 |
| set2_318 | 1539 |
| set2_319 | 1540 |
| set2_320 | 1541 |
| set2_321 | 1542 |
| set2_322 | 1543 |
| set2_323 | 1544 |
| set2_324 | 1545 |
| set2_325 | 1546 |
| set2_326 | 1547 |
| set2_327 | 1548 |
| set2_328 | 1549 |
| set2_329 | 1550 |
| set2_330 | 1551 |
| set2_331 | 1552 |
| set2_332 | 1553 |
| set2_333 | 1554 |
| set2_334 | 1555 |
| set2_335 | 1556 |
| set2_336 | 1557 |
| set2_337 | 1558 |
| set2_338 | 1559 |
| set2_339 | 1560 |
| set2_340 | 1561 |
| set2_341 | 1562 |
| set2_342 | 1563 |
| set2_343 | 1564 |
| set2_344 | 1565 |
| set2_345 | 1566 |
| set2_346 | 1567 |
| set2_347 | 1568 |
| set2_348 | 1569 |
| set2_349 | 1570 |
| set2_350 | 1571 |
| set2_351 | 1572 |
| set2_352 | 1573 |
| set2_353 | 1574 |
| set2_354 | 1575 |
| set2_355 | 1576 |
| set2_356 | 1577 |
| set2_357 | 1578 |
| set2_358 | 1579 |
| set2_359 | 1580 |
| set2_360 | 1581 |
| set2_361 | 1582 |
| set2_362 | 1583 |
| set2_363 | 1584 |
| set2_364 | 1585 |
| set2_365 | 1586 |
| set2_366 | 1587 |
| set2_367 | 1588 |
| set2_368 | 1589 |
| set2_369 | 1590 |
| set2_370 | 1591 |
| set2_371 | 1592 |
| set2_372 | 1593 |
| set2_373 | 1594 |
| set2_374 | 1595 |
| set2_375 | 1596 |
| set2_376 | 1597 |
| set2_377 | 1598 |
| set2_378 | 1599 |
| set2_379 | 1600 |
| set2_380 | 1601 |
| set2_381 | 1602 |
| set2_382 | 1603 |
| set2_383 | 1604 |
| set2_384 | 1605 |
| set2_385 | 1606 |
| set2_386 | 1607 |
| set2_387 | 1608 |
| set2_388 | 1609 |
| set2_389 | 1610 |
| set2_390 | 1611 |
| set2_391 | 1612 |
| set2_392 | 1613 |
| set2_393 | 1614 |
| set2_394 | 1615 |
| set2_395 | 1616 |
| set2_396 | 1617 |
| set2_397 | 1618 |
| set2_398 | 1619 |
| set2_399 | 1620 |
| set2_400 | 1621 |
| set2_401 | 1622 |
| set2_402 | 1623 |
| set2_403 | 1624 |
| set2_404 | 1625 |
| set2_405 | 1626 |
| set2_406 | 1627 |
| set2_407 | 1628 |
| set2_408 | 1629 |
| set2_409 | 1630 |
| set2_410 | 1631 |
| set2_411 | 1632 |
| set2_412 | 1633 |
| set2_413 | 1634 |
| set2_414 | 1635 |
| set2_415 | 1636 |
| set2_416 | 1637 |
| set2_417 | 1638 |
| set2_418 | 1639 |
| set2_419 | 1640 |
| set2_420 | 1641 |
| set2_421 | 1642 |
| set2_422 | 1643 |
| set2_423 | 1644 |
| set2_424 | 1645 |
| set2_425 | 1646 |
| set2_426 | 1647 |
| set2_427 | 1648 |
| set2_428 | 1649 |
| set2_429 | 1650 |
| set2_430 | 1651 |
| set2_431 | 1652 |
| set2_432 | 1653 |
| set2_433 | 1654 |
| set2_434 | 1655 |
| set2_435 | 1656 |
| set2_436 | 1657 |
| set2_437 | 1658 |
| set2_438 | 1659 |
| set2_439 | 1660 |
| set2_440 | 1661 |
| set2_441 | 1662 |
| set2_442 | 1663 |
| set2_443 | 1664 |
| set2_444 | 1665 |
| set2_445 | 1666 |
| set2_446 | 1667 |
| set2_447 | 1668 |
| set2_448 | 1669 |
| set2_449 | 1670 |
| set2_450 | 1671 |
| set2_451 | 1672 |
| set2_452 | 1673 |
| set2_453 | 1674 |
| set2_454 | 1675 |
| set2_455 | 1676 |
| set2_456 | 1677 |
| set2_457 | 1678 |
| set2_458 | 1679 |
| set2_459 | 1680 |
| set2_460 | 1681 |
| set2_461 | 1682 |
| set2_462 | 1683 |
| set2_463 | 1684 |
| set2_464 | 1685 |
| set2_465 | 1686 |
| set2_466 | 1687 |
| set2_467 | 1688 |
| set2_468 | 1689 |
| set2_469 | 1690 |
| set2_470 | 1691 |
| set2_471 | 1692 |
| set2_472 | 1693 |
| set2_473 | 1694 |
| set2_474 | 1695 |
| set2_475 | 1696 |
| set2_476 | 1697 |
| set2_477 | 1698 |
| set2_478 | 1699 |
| set2_479 | 1700 |
| set2_480 | 1701 |
| set2_481 | 1702 |
| set2_482 | 1703 |
| set2_483 | 1704 |
| set2_484 | 1705 |
| set2_485 | 1706 |
| set2_486 | 1707 |
| set2_487 | 1708 |
| set2_488 | 1709 |
| set2_489 | 1710 |
| set2_490 | 1711 |
| set2_491 | 1712 |
| set2_492 | 1713 |
| set2_493 | 1714 |
| set2_494 | 1715 |
| set2_495 | 1716 |
| set2_496 | 1717 |
| set2_497 | 1718 |
| set2_498 | 1719 |
| set2_499 | 1720 |
| set2_500 | 1721 |
| set2_501 | 1722 |
| set2_502 | 1723 |
| set2_503 | 1724 |
| set2_504 | 1725 |
| set2_505 | 1726 |
| set2_506 | 1727 |
| set2_507 | 1728 |
| set2_508 | 1729 |
| set2_509 | 1730 |
| set2_510 | 1731 |
| set2_511 | 1732 |
| set2_512 | 1733 |
| set2_513 | 1734 |
| set2_514 | 1735 |
| set2_515 | 1736 |
| set2_516 | 1737 |
| set2_517 | 1738 |
| set2_518 | 1739 |
| set2_519 | 1740 |
| set2_520 | 1741 |
| set2_521 | 1742 |
| set2_522 | 1743 |
| set2_523 | 1744 |
| set2_524 | 1745 |
| set2_525 | 1746 |
| set2_526 | 1747 |
| set2_527 | 1748 |
| set2_528 | 1749 |
| set2_529 | 1750 |
| set2_530 | 1751 |
| set2_531 | 1752 |
| set2_532 | 1753 |
| set2_533 | 1754 |
| set2_534 | 1755 |
| set2_535 | 1756 |
| set2_536 | 1757 |
| set2_537 | 1758 |
| set2_538 | 1759 |
| set2_539 | 1760 |
| set2_540 | 1761 |
| set2_541 | 1762 |
| set2_542 | 1763 |
| set2_543 | 1764 |
| set2_544 | 1765 |
| set2_545 | 1766 |
| set2_546 | 1767 |
| set2_547 | 1768 |
| set2_548 | 1769 |
| set2_549 | 1770 |
| set2_550 | 1771 |
| set2_551 | 1772 |
| set2_552 | 1773 |
| set2_553 | 1774 |
| set2_554 | 1775 |
| set2_555 | 1776 |
| set2_556 | 1777 |
| set2_557 | 1778 |
| set2_558 | 1779 |
| set2_559 | 1780 |
| set2_560 | 1781 |
| set2_561 | 1782 |
| set2_562 | 1783 |
| set2_563 | 1784 |
| set2_564 | 1785 |
| set2_565 | 1786 |
| set2_566 | 1787 |
| set2_567 | 1788 |
| set2_568 | 1789 |
| set2_569 | 1790 |
| set2_570 | 1791 |
| set2_571 | 1792 |
| set2_572 | 1793 |
| set2_573 | 1794 |
| set2_574 | 1795 |
| set2_575 | 1796 |
| set2_576 | 1797 |
| set2_577 | 1798 |
| set2_578 | 1799 |
| set2_579 | 1800 |
| set2_580 | 1801 |
| set2_581 | 1802 |
| set2_582 | 1803 |
| set2_583 | 1804 |
| set2_584 | 1805 |
| set2_585 | 1806 |
| set2_586 | 1807 |
| set2_587 | 1808 |
| set2_588 | 1809 |
| set2_589 | 1810 |
| set2_590 | 1811 |
| set2_591 | 1812 |
| set2_592 | 1813 |
| set2_593 | 1814 |
| set2_594 | 1815 |
| set2_595 | 1816 |
| set2_596 | 1817 |
| set2_597 | 1818 |
| set2_598 | 1819 |
| set2_599 | 1820 |
| set2_600 | 1821 |
| set2_601 | 1822 |
| set2_602 | 1823 |
| set2_603 | 1824 |
| set2_604 | 1825 |
| set2_605 | 1826 |
| set2_606 | 1827 |
| set2_607 | 1828 |
| set2_608 | 1829 |
| set2_609 | 1830 |
| set2_610 | 1831 |
| set2_611 | 1832 |
| set2_612 | 1833 |
| set2_613 | 1834 |
| set2_614 | 1835 |
| set2_615 | 1836 |
| set2_616 | 1837 |
| set2_617 | 1838 |
| set2_618 | 1839 |
| set2_619 | 1840 |
| set2_620 | 1841 |
| set2_621 | 1842 |
| set2_622 | 1843 |
| set2_623 | 1844 |
| set2_624 | 1845 |
| set2_625 | 1846 |
| set2_626 | 1847 |
| set2_627 | 1848 |
| set2_628 | 1849 |
| set2_629 | 1850 |
| set2_630 | 1851 |
| set2_631 | 1852 |
| set2_632 | 1853 |
| set2_633 | 1854 |
| set2_634 | 1855 |
| set2_635 | 1856 |
| set2_636 | 1857 |
| set2_637 | 1858 |
| set2_638 | 1859 |
| set2_639 | 1860 |
| set2_640 | 1861 |
| set2_641 | 1862 |
| set2_642 | 1863 |
| set2_643 | 1864 |
| set2_644 | 1865 |
| set2_645 | 1866 |
| set2_646 | 1867 |
| set2_647 | 1868 |
| set2_648 | 1869 |
| set2_649 | 1870 |
| set2_650 | 1871 |
| set2_651 | 1872 |
| set2_652 | 1873 |
| set2_653 | 1874 |
| set2_654 | 1875 |
| set2_655 | 1876 |
| set2_656 | 1877 |
| set2_657 | 1878 |
| set2_658 | 1879 |
| set2_659 | 1880 |
| set2_660 | 1881 |
| set2_661 | 1882 |
| set2_662 | 1883 |
| set2_663 | 1884 |
| set2_664 | 1885 |
| set2_665 | 1886 |
| set2_666 | 1887 |
| set2_667 | 1888 |
| set2_668 | 1889 |
| set2_669 | 1890 |
| set2_670 | 1891 |
| set2_671 | 1892 |
| set2_672 | 1893 |
| set2_673 | 1894 |
| set2_674 | 1895 |
| set2_675 | 1896 |
| set2_676 | 1897 |
| set2_677 | 1898 |
| set2_678 | 1899 |
| set2_679 | 1900 |
| set2_680 | 1901 |
| set2_681 | 1902 |
| set2_682 | 1903 |
| set2_683 | 1904 |
| set2_684 | 1905 |
| set2_685 | 1906 |
| set2_686 | 1907 |
| set2_687 | 1908 |
| set2_688 | 1909 |
| set2_689 | 1910 |
| set2_690 | 1911 |
| set2_691 | 1912 |
| set2_692 | 1913 |
| set2_693 | 1914 |
| set2_694 | 1915 |
| set2_695 | 1916 |
| set2_696 | 1917 |
| set2_697 | 1918 |
| set2_698 | 1919 |
| set2_699 | 1920 |
| set2_700 | 1921 |
| set2_701 | 1922 |
| set2_702 | 1923 |
| set2_703 | 1924 |
| set2_704 | 1925 |
| set2_705 | 1926 |
| set2_706 | 1927 |
| set2_707 | 1928 |
| set2_708 | 1929 |
| set2_709 | 1930 |
| set2_710 | 1931 |
| set2_711 | 1932 |
| set2_712 | 1933 |
| set2_713 | 1934 |
| set2_714 | 1935 |
| set2_715 | 1936 |
| set2_716 | 1937 |
| set2_717 | 1938 |
| set2_718 | 1939 |
| set2_719 | 1940 |
| set2_720 | 1941 |
| set2_721 | 1942 |
| set2_722 | 1943 |
| set2_723 | 1944 |
| set2_724 | 1945 |
| set2_725 | 1946 |
| set2_726 | 1947 |
| set2_727 | 1948 |
| set2_728 | 1949 |
| set2_729 | 1950 |
| set2_730 | 1951 |
| set2_731 | 1952 |
| set2_732 | 1953 |
| set2_733 | 1954 |
| set2_734 | 1955 |
| set2_735 | 1956 |
| set2_736 | 1957 |
| set2_737 | 1958 |
| set2_738 | 1959 |
| set2_739 | 1960 |
| set2_740 | 1961 |
| set2_741 | 1962 |
| set2_742 | 1963 |
| set2_743 | 1964 |
| set2_744 | 1965 |
| set2_745 | 1966 |
| set2_746 | 1967 |
| set2_747 | 1968 |
| set2_748 | 1969 |
| set2_749 | 1970 |
| set2_750 | 1971 |
| set2_751 | 1972 |
| set2_752 | 1973 |
| set2_753 | 1974 |
| set2_754 | 1975 |
| set2_755 | 1976 |
| set2_756 | 1977 |
| set2_757 | 1978 |
| set2_758 | 1979 |
| set2_759 | 1980 |
| set2_760 | 1981 |
| set2_761 | 1982 |
| set2_762 | 1983 |
| set2_763 | 1984 |
| set2_764 | 1985 |
| set2_765 | 1986 |
| set2_766 | 1987 |
| set2_767 | 1988 |
| set2_768 | 1989 |
| set2_769 | 1990 |
| set2_770 | 1991 |
| set2_771 | 1992 |
| set2_772 | 1993 |
| set2_773 | 1994 |
| set2_774 | 1995 |
| set2_775 | 1996 |
| set2_776 | 1997 |
| set2_777 | 1998 |

[0075] In one embodiment there is provided a polypeptide comprising:

[0076] a sequence (such as a CDRH1 sequence) comprising or consisting of a sequence sharing 80% or greater sequence identity with a CDRH1 sequence as shown in Table 1 and/or

[0077] a sequence (such as a CDRH2 sequence) comprising or consisting of a sequence sharing 80% or greater sequence identity with a CDRH2 sequence as shown in Table 1 and/or

[0078] a sequence (such as a CDRH3 sequence) comprising or consisting of a sequence sharing 80% or greater sequence identity with a CDRH3 sequence as shown in Table 1.

[0079] Suitably the polypeptide comprises

[0080] a sequence (such as a CDRH1 sequence) comprising or consisting of a sequence sharing 90% or greater sequence identity with a CDRH1 sequence as shown in Table 1 and/or

[0081] a sequence (such as a CDRH2 sequence) comprising or consisting of a sequence sharing 90% or greater sequence identity with a CDRH2 sequence as shown in Table 1 and/or

[0082] a sequence (such as a CDRH3 sequence) comprising or consisting of a sequence sharing 90% or greater sequence identity with a CDRH3 sequence as shown in Table 1.

[0083] More suitably the polypeptide comprises

[0084] a sequence (such as a CDRH1 sequence) comprising or consisting of a CDRH1 sequence as shown in Table 1 and/or

[0085] a sequence (such as a CDRH2 sequence) comprising or consisting of a CDRH2 sequence as shown in Table 1 and/or

[0086] a sequence (such as a CDRH3 sequence) comprising or consisting of a CDRH3 sequence as shown in Table 1.

[0087] More suitably the polypeptide comprises

[0088] a sequence (such as a CDRH1 sequence) comprising or consisting of a CDRH1 sequence as shown in Table 1 and

[0089] a sequence (such as a CDRH2 sequence) comprising or consisting of a CDRH2 sequence as shown in Table 1 and

[0090] a sequence (such as a CDRH3 sequence) comprising or consisting of a CDRH3 sequence as shown in Table 1.

[0091] Suitably the polypeptide comprises

[0092] a sequence (such as a FWRH1 sequence) comprising or consisting of a sequence sharing 80% or greater sequence identity with a FWRH1 sequence as shown in Table 1 and/or

[0093] a sequence (such as a FWRH2 sequence) comprising or consisting of a sequence sharing 80% or greater sequence identity with a FWRH2 sequence as shown in Table 1 and/or

[0094] a sequence (such as a FWRH3 sequence) comprising or consisting of a sequence sharing 80% or greater sequence identity with a FWRH3 sequence as shown in Table 1 and/or

[0095] a sequence (such as a FWRH4 sequence) comprising or consisting of a sequence sharing 80% or greater sequence identity with a FWRH4 sequence as shown in Table 1.

[0096] In one embodiment the polypeptide comprises:

[0097] a sequence (such as a FWRH1 sequence) comprising or consisting of a sequence sharing 80% or greater sequence identity with a FWRH1 sequence as shown in Table 1 and/or

[0098] a sequence (such as a FWRH2 sequence) comprising or consisting of a sequence sharing 80% or greater sequence identity with a FWRH2 sequence as shown in Table 1 and/or

[0099] a sequence (such as a FWRH3 sequence) comprising or consisting of a sequence sharing 80% or greater sequence identity with a FWRH3 sequence as shown in Table 1 and/or

[0100] a sequence (such as a FWRH4 sequence) comprising or consisting of a sequence sharing 80% or greater sequence identity with a FWRH4 sequence as shown in Table 1.

[0101] More suitably the polypeptide comprises

[0102] a sequence (such as a FWRH1 sequence) comprising or consisting of a sequence sharing 90% or greater sequence identity with a FWRH1 sequence as shown in Table 1 and/or

[0103] a sequence (such as a FWRH2 sequence) comprising or consisting of a sequence sharing 90% or greater sequence identity with a FWRH2 sequence as shown in Table 1 and/or

[0104] a sequence (such as a FWRH3 sequence) comprising or consisting of a sequence sharing 90% or greater sequence identity with a FWRH3 sequence as shown in Table 1 and/or

[0105] a sequence (such as a FWRH4 sequence) comprising or consisting of a sequence sharing 90% or greater sequence identity with a FWRH4 sequence as shown in Table 1.

[0106] More suitably the polypeptide comprises

[0107] a sequence (such as a FWRH1 sequence) comprising or consisting of a FWRH1 sequence as shown in Table 1 and/or

[0108] a sequence (such as a FWRH2 sequence) comprising or consisting of a FWRH2 sequence as shown in Table 1 and/or

[0109] a sequence (such as a FWRH3 sequence) comprising or consisting of a FWRH3 sequence as shown in Table 1 and/or

[0110] a sequence (such as a FWRH4 sequence) comprising or consisting of a FWRH4 sequence as shown in Table 1.

[0111] More suitably the polypeptide comprises

[0112] a sequence (such as a FWRH1 sequence) comprising or consisting of a FWRH1 sequence as shown in Table 1 and

[0113] a sequence (such as a FWRH2 sequence) comprising or consisting of a FWRH2 sequence as shown in Table 1 and

[0114] a sequence (such as a FWRH3 sequence) comprising or consisting of a FWRH3 sequence as shown in Table 1 and

[0115] a sequence (such as a FWRH4 sequence) comprising or consisting of a FWRH4 sequence as shown in Table 1.

[0116] Suitably the polypeptide comprises three complementarity determining regions (CDRH1-CDRH3). Suitably, the polypeptide comprises four framework regions (FWRH1-FWRH4).

[0117] In one embodiment there is provided a polypeptide comprising or consisting of a sequence sharing 80% or greater, more suitably 90% or greater, sequence identity with any immunoglobulin heavy chain variable domain (VH) sequence as shown in Table 1 (i.e. from N- to C-terminus, the combined sequence of FWRH1, CDRH1, FWRH2, CDRH2, FWRH3, CDRH3, FWRH4, for a single row) or Table 2. More suitably the polypeptide comprises or consists of an immunoglobulin heavy chain variable domain (VH) sequence as shown in Table 1 (i.e. from N- to C-terminus, the combined sequence of FWRH1, CDRH1, FWRH2, CDRH2, FWRH3, CDRH3, FWRH4, for a single row) or Table 2.

[0118] Suitably the polypeptide is an antibody, such as an antibody which belongs to the isotype subclass IGHA1, IGHA2 or IGHG1. Alternatively, the polypeptide is an antibody fragment, such as a F(ab′)₂, an Fd, an Fv, an scFv, a VH, or a VHH.

[0119] Suitably the polypeptide binds to the spike protein (S protein) of SARS-CoV-2. More suitably the polypeptide binds to the S1 or S2 domain of the spike protein (S protein), such as the S1 domain of the spike protein (S1 protein).

[0120] An antibody fragment as used herein refers to a portion of an antibody that binds to a target. Examples of binding fragments encompassed within the term include a Fab, a F(ab′)₂, an Fd, an Fv, an scFv, a VH, or a VHH.

[0121] Suitably the polypeptide comprises light chain CDRs (i.e. CDRL1, CDRL2, CDRL3). More suitably the polypeptide comprises light chain CDRs and framework regions (i.e. FWRL1, CDRL1, FWRL2, CDRL2, FWRL3, CDRL3 and FWRL4). More suitably the polypeptide is an antibody comprising both heavy and light chains. Suitably the light chain CDRs and/or frameworks and/or light chains are any one or more of those disclosed in Xue et al. Biochem Biophys Res Commun. 515(3):481-486, (2019).

[0122] Suitably, the polypeptide of the invention is isolated. An “isolated” polypeptide is one that is removed from its original environment. For example, a naturally-occurring polypeptide of the invention is isolated if it is separated from some or all of the coexisting materials in the natural system.

[0123] In one embodiment there is provided a pharmaceutical composition comprising the polypeptide and one or more pharmaceutically acceptable diluents or carriers. Suitably the composition comprises at least one further, different polypeptide according to any preceding claim. Suitably the composition comprises at least one further active agent.

[0124] In one embodiment the polypeptide or pharmaceutical composition is for use in suppressing or treating a disease or disorder mediated by infection of SARS-CoV-2, such as COVID-19, or for providing prophylaxis to a subject at risk of infection of SARS-CoV-2, such as COVID-19. In one embodiment there is provided a method of suppressing or treating a disease or disorder mediated by infection of SARS-CoV-2, such as COVID-19 or for providing prophylaxis to a subject at risk of infection of SARS-CoV-2, such as COVID-19, comprising administering to a person in need thereof a therapeutically effective amount of the polypeptide or pharmaceutical composition.

[0125] In one embodiment there is provided a polynucleotide encoding a polypeptide sequence disclosed in Table 1 or Table 2. In one embodiment there is provided a polynucleotide encoding an immunoglobulin heavy chain variable domain recited in Table 1 or Table 2. In one embodiment there is provided a vector comprising the polynucleotide.

[0126] The present invention will now be further described by means of the following non-limiting example.

### Equivalents and Scope

[0127] While various invention embodiments have been particularly shown and described in the present disclosure, it will be understood by those skilled in the art that various changes in form and details may be made without departing from the spirit and scope of the embodiments disclosed herein and set forth in the appended claims.

[0128] Those skilled in the art will recognize or be able to ascertain using no more than routine experimentation, many equivalents to the specific embodiments described herein. The scope of the present disclosure is not intended to be limited to the above description, but rather is as set forth in the appended claims.

[0129] In the claims, articles such as “a,” “an,” and “the” may mean one or more than one unless indicated to the contrary or otherwise evident from the context. Claims or descriptions that include “or” between one or more members of a group are considered satisfied if one, more than one, or all of the group members are present in, employed in, or otherwise relevant to a given product or process unless indicated to the contrary or otherwise evident from the context. The disclosure includes embodiments in which exactly one member of a group is present in, employed in, or otherwise relevant to a given product or process. The invention includes embodiments in which more than one, or all group members are present in, employed in, or otherwise relevant to a given product or process.

[0130] It is also noted that the term “comprising” is intended to be open and permits but does not require the inclusion of additional elements or steps. When the term “comprising” is used herein, the terms “consisting of” and “or including” are thus also encompassed and disclosed.

[0131] Where ranges are given, endpoints are included. Furthermore, it is to be understood that unless otherwise indicated or otherwise evident from the context and understanding of one of ordinary skill in the art, values that are expressed as ranges can assume any specific value or subrange within the stated ranges in different embodiments of the invention, to the tenth of the unit of the lower limit of the range, unless the context clearly dictates otherwise.

[0132] In addition, it is to be understood that any particular embodiment of the present disclosure that falls within the prior art may be explicitly excluded from any one or more of the claims. Since such embodiments are deemed to be known to those of ordinary skill in the art, they may be excluded even if the exclusion is not set forth explicitly herein. Any particular embodiments of compositions disclosed herein can be excluded from any one or more claims, for any reason, whether or not related to the existence of prior art.

[0133] All cited sources, for example, references, publications, databases, database entries, and art cited herein, are incorporated into this application by reference, even if not expressly stated in the citation. In case of conflicting statements of a cited source and the instant application, the statement in the instant application shall control.

[0134] Section and table headings are not intended to be limiting.

### EXAMPLES

### Example 1

### COVID-19 Disease Samples

[0135] Blood samples were collected from n=19 patients admitted to hospital with acute COVID-19 pneumonia. The mean age of patients was 50.2 (SD 18.5) years and 13 (68%) were male. All patients had a clinical history consistent with COVID-19 and typical radiological changes. Seventeen patients had a confirmatory positive PCR test for SARS-CoV-2. The patients experienced an average of 11 days (range 4-20) of symptoms prior to the day on which the blood sample was collected. Nine of the patients were still requiring hospital care but not oxygen therapy on day of sample collection (WHO Ordinal Scale Score 3), while eight were hospitalised requiring oxygen by conventional mask or nasal prongs (WHO Ordinal Scale Score 4) and two were hospitalised with severe COVID-19 pneumonia requiring high-flow nasal oxygen (WHO Ordinal Scale Score 5). On the day of sample collection, the direct clinical care team considered two patients to be deteriorating, four improving and the remaining thirteen were clinically stable.

### SARS-CoV-2 Infection Results in a Stereotypic B Cell Response

[0136] IGHA and IGHG BCR sequencing yielded on average 135,437 unique sequences, and 23,742 clonotypes per sample (Table 3). To characterise the B cell response in COVID-19, we compared this BCR repertoire data to BCR repertoire data from healthy controls obtained in a separate study¹⁵. Comparing IGHV gene segment usage revealed a significantly different IGHV gene usage in COVID-19 patients compared to the healthy controls, most notably with increases in the usage of IGHV2-5 (2.6×IGHA, 1.0×IGHG increase), IGHV2-70 (4.6×IGHA, 4.1×IGHG increase), IGHV3-30 (2.0×IGHA, 1.4×IGHG increase), IGHV5-51 (3.5×IGHA, 2.0×IGHG increase), and IGHV4-34 (1.4×IGHA, 2.4×IGHG increase) in the COVID-19 patients (FIG. 1A). All of these V gene segments have been previously observed in SARS-CoV-1 or SARS-CoV-2 specific antibodies¹⁶. IGHV4-34 has been shown to bind both autoantigens¹⁷ and commensal bacteria¹⁸ and has been associated with SLE¹⁹. Our data extends this, showing that the proportion of sequences containing the autoreactive AVY & NHS sequence motifs within the IGHV region is significantly more frequent in improving COVID-19 patients compared to stable or deteriorating COVID-19 patients, specifically in the IGHG1 isotype subclass (p-value=0.038; FIG. 6).

[0137] Comparing isotype subclasses showed a significant increase in the relative usage of IGHA1 and IGHG1 in COVID-19 patients (FIG. 1B)—these are the two first isotype subclasses that are switched to upon activation of IGHM²⁰. There was also an increase in the mean CDRH3 length of the BCRs in the COVID-19 patients, that was most pronounced in the IGHA1, IGHA2 and IGHG1 isotype subclasses (FIG. 1C).

### SARS-CoV-2 Infection Stimulates Both Naïve and Memory Responses

[0138] To further investigate the COVID-19-specific B cell response, we analysed the characteristics of the BCR sequences that are consistent with recent B cell activation—somatic hypermutation, and clonal expansion. In healthy controls, for class-switched sequences, there is a clear unimodal distribution of sequences with different numbers of mutations, and a mean mutation count across IGHA and IGHG isotypes of 17.6 (FIG. 2A). In the COVID-19 samples, the mean mutation count was 14.4, and there was a bimodal distribution with a separate peak of sequences with no mutations. This bimodal distribution was most pronounced in the IGHG1, IGHG3, and IGHA1 isotype subclasses, corresponding to the increased isotype usages. Such a distribution is consistent with an expansion of recently class-switched B cells that have yet to undergo somatic hypermutation. There was considerable variation between participants in the proportion of unmutated sequences (FIG. 5A, FIG. 5B, FIG. 5C, and FIG. 5D), which had no significant correlation with the number of days since symptom onset (R=0.09, p=0.72), but was lower in the deteriorating compared to improving patients (FIG. 2B)

[0139] To investigate differential clonal expansion between patients, the Shannon diversity index of each repertoire was calculated (while accounting for differences in read depth through subsampling). A more diverse repertoire is indicative of a greater abundance of different clonal expansions. The BCR repertoires of the COVID-19 patients were significantly more diverse than the BCR repertoires of the healthy controls (FIG. 2C); this increase in diversity was positively correlated with an increased proportion of unmutated sequences (R=0.44, p=0.061; FIG. 2D). Interestingly, when we investigated the largest clonal expansions, despite having a more diverse repertoire, the largest clonal expansions in the COVID-19 samples were larger than in the healthy controls (FIG. 2E). These large clonal expansions were also highly mutated and had similar levels of mutation between the COVID-19 samples and the healthy controls (FIG. 2F).

### Sequence Convergence can be Used to Identify Putative SARS-CoV-2 Specific Antibodies

[0140] Given the skewing of the B cell response in the COVID-19 patients to specific IGHV genes, we next investigated whether the same similarity was also seen on the BCR sequence level between different participants. Such convergent BCR signatures have been observed in response to other infectious diseases²¹, and may be used to identify disease-specific antibody sequences.

[0141] Of the 435,420 total clonotypes across all the COVID-19 patients, 9,646 (2.2%) were shared between at least two of the participants (FIG. 3A). As convergence could occur by chance or be due to an unrelated memory response from commonly encountered pathogens, the healthy control dataset was used to subtract irrelevant BCR sequences. Of the 9,646 convergent clonotypes, 1,442 (14.9%) were also present in at least one of the 40 healthy control samples. As expected, of the convergent clonotypes that were also present in the healthy control samples, the mean mutation count was significantly greater (FIG. 3B), and the mean CDRH3 length significantly shorter (FIG. 3C) than the convergent clonotypes that were unique to the COVID-19 patients.

[0142] To identify a set of SARS-CoV-2-specific antibody sequences with high confidence, we identified 777 convergent clonotypes that were shared between at least four of the COVID-19 patients (see Tables 1 and 2, which also include further convergent clonotypes from another set of samples), but not seen in the healthy controls. In parallel, for a comparison of convergent signatures, we performed the same analysis on a cohort of seven metastatic breast cancer patient biopsy samples²², which identified 469 convergent clonotypes. These convergent clonotypes were highly specific to each disease cohort (FIG. 3D). The 777 COVID-19 convergent clonotypes had low mutation levels, with a mean mutation count of 2, and only 51 clonotypes with a mean mutation greater than 5. The sequences within the convergent clonotypes were primarily of the IGHG1 (70%) and IGHA1 (16%) subclasses (FIG. 7A). The convergent clonotypes used a diversity of IGHV gene segments, with IGHV3-30, IGHV3-30-3 and IGHV3-33 as the most highly represented (FIG. 7B). This IGHV gene usage distribution differs between that of the total repertoire, and IGHV3-30 is also the most highly used IGHV gene in the CoV-AbDab¹⁶.

[0143] We next tested whether these convergent clonotypes correlated with disease severity. Indeed, 25 of these convergent clonotypes were found to associate with clinical symptoms after correcting for multiple testing, of which 22 were observed at a significantly higher frequency in improving patients (FIG. 3E, FIG. 8A, and FIG. 8B). This is a significantly higher proportion associated with clinical symptoms compared to that expected by chance (p-value=0.018 by random permutations of labels). Interestingly, some of these clonotypes are common in patients comprising >0.1% of a patient's repertoire. Furthermore, the convergent clonotypes that are associated with clinical symptoms cluster together (FIG. 3F) and are found primarily in the IGHA1 and IGHG1 isotypes (FIG. 3G).

BCR Sequence Convergence Signatures are Shared Between Different COVID-19 Studies in Different Locations and from Different Anatomical Sites

[0144] To further explore whether the convergent clonotypes observed in our study were indeed disease specific, and to determine whether such convergence was common across studies and geographic regions, we compared these 777 convergent clonotypes to public B cell datasets.

[0145] First, we compared our data to RNAseq data of bronchoalveolar lavage fluid obtained from five of the first infected patients in Wuhan, China²³. These samples were obtained for the purpose of metagenomic analyses to identify the aetiological agent of the novel coronavirus but were re-analysed to determine whether we could extract any transcripts from BCRs. From the 10,038,758 total reads, we were able to identify 16 unique CDR3 AA sequences (Table 4). Of these, one had an exact AA match to a clonotype in our data and shared the same V gene segment (IGHV3-15), and J gene segment (IGHJ4) usage (FIG. 4A). This clonotype had a CDRH3 AA length of 12, so such a match is unlikely to occur due to chance alone. The clonotype contained 699 total sequences and was convergent between 8 of our 19 COVID-19 patients, but not present in the healthy controls. The clonotype was highly diverse, and the sequences had evidence of low mutation from germline, with a mean mutation count over all sequences of 4.8 (FIG. 7B).

[0146] Next, we compared our 777 convergent clonotypes to CoV-AbDab—the Coronavirus Antibody Database [accessed 10 May 2020]¹⁶. At the time of access, this database contained 80 non-redundant CDRH3 sequences from published and patented antibodies proven to bind SARS-CoV-1 and/or SARS-CoV-2. We found 6 of our clonotypes to have high CDRH3 homology to the antibodies in CoV-AbDab (FIG. 4B and FIG. 10). The most striking similarity was to S304, a previously described SARS-CoV-1 and SARS-CoV-2 receptor-binding domain antibody able to contribute to viral neutralisation²⁴. One of the 777 convergent clonotypes contained sequences with an exact CDRH3 AA sequence match and utilised the same IGHV and IGHJ germline gene segments to S304. This clonotype was convergent across 6 patients and had a mean mutation count of 1.1.

[0147] Finally, we compared our data to a publicly available BCR deep sequencing dataset from six COVID-19 patients from Stanford, USA. 405 of our 777 convergent clonotypes matched to sequences in this dataset (FIG. 4C), showing the high level of convergence between studies. The average number of clonotype matches to the Stanford COVID-19 patient repertoires was 95, but this varied considerably between patients and timepoints. Two of the six patients were seronegative at the day of sampling (7451 and 7453), and these two patients had the fewest clonotype matches (16 and 14 respectively). Patient 7453 had an additional sample taken two days later (following seroconversion), and at this point had a large increase in the number of clonotype matches to 204.

### Supplementary Information

TABLE 3
Summary of number of unique sequences, and number
of clonotypes obtained for each COVID-19 patient

| Participant ID | Unique BCR Sequences | Clonotypes |
|---|---|---|
| 1 | 47878 | 15456 |
| 2 | 257570 | 53168 |
| 3 | 33099 | 9616 |
| 4 | 37138 | 10754 |
| 5 | 198732 | 20036 |
| 6 | 233283 | 26181 |
| 7 | 51305 | 22276 |
| 8 | 39303 | 9391 |
| 9 | 221870 | 18278 |
| 10 | 54645 | 9255 |
| 11 | 202896 | 41132 |
| 12 | 31035 | 6791 |
| 13 | 40995 | 14782 |
| 14 | 171231 | 21373 |
| 15 | 280310 | 36446 |
| 16 | 29620 | 8736 |
| 17 | 253037 | 34805 |
| 18 | 60316 | 15068 |
| 19 | 329055 | 77557 |

TABLE 4
CDRH3 AA sequences identified from bronchoalveolar RNAseq data

| bestVHit | bestJHit | aaSeqCDR3 | SEQ ID NO |
|---|---|---|---|
| IGHV2-26 | IGHJ3 | CARDSGRHLGPFDIW | 1999 |
| IGHV1-2 | IGHJ3 | CATPYYYDGGLDAFDIW | 2000 |
| IGHV3-74 | IGHJ5 | CARDLSRTNWFDPW | 2001 |
| IGHV3-15 | IGHJ4 | CTTDLHDYGDSDYW | 2002 |
| IGHV3-15 | IGHJ4 | CTTDFGGMITFGGVLRRI | 2003 |
| IGHV3-21 | IGHJ4 | CARAQSRGGYDSFFDFW | 2004 |
| IGHV3-21 | IGHJ4 | CGRGGPGTGIDYW | 2005 |
| IGHV4-59 | IGHJ5 | CARGGQYNNWFAPW | 2006 |
| IGHV3-74 | IGHJ5 | CVRDLSRTNWFDPW | 2007 |
| IGHV3-15 | IGHJ4 | YTRDLHDYGDSDYW | 2008 |
| IGHV3-23 | IGHJ3 | CAKIPSFLSDYDVHPNDAIDIW | 2009 |
| IGHV5-10-1 | IGHJ4 | CARHPQGAQFSNLGTYYFDYW | 2010 |
| IGHV4-59 | IGHJ4 | CARDGEYGGLAMW | 2011 |
| IGHV5-51 | IGHJ6 | CARPGTYYDILTGYSNHGMDVW | 2012 |
| IGHV4-39 | IGHJ5 | CARHASFRGTNYNWFDPW | 2013 |
| IGHV3-53 | IGHJ5 | CARDTSTEDVAWWFDPW | 2014 |

[0149] The CDRH3 identified in our SARS-CoV-2 patient dataset is SEQ ID NO: 2002.

### Discussion

[0150] We have used deep sequencing of the BCR heavy chain repertoire to evaluate the B cell responses of 19 individuals with COVID-19. In agreement with previous studies, there was a skewing of the repertoire in the response to SARS-CoV-2 infection, with an increased use of certain V genes, and an increase in the proportion of antibodies with longer CDRH3s, and an altered isotype subclass distribution¹⁴. The significantly increased usage of IGHA1 observed in the COVID-19 patients is in line with mucosal responses, where the longer hinge in IGHA1 compared to IGHA2 may offer advantages in antigen recognition by allowing higher avidity bivalent interactions with distantly spaced antigens.

[0151] As anticipated, given the novel nature of the virus, that SARS-CoV-2 infection largely stimulated a characteristically naïve response, rather than a reactivation of pre-existing memory B cells—(1) there was an increased prevalence of unmutated antigen-experienced class-switched BCR sequences, (2) an increase in the diversity of class-switched IGHA and IGHG BCRs, and (3) an increase in the usage of isotype subclasses that are associated with viral immunity. These observations are consistent with an increase in the frequency of recently activated B cells in response to SARS-CoV-2. In addition to the naïve response, there was also evidence of a proportion of the response arising from memory recall. In the COVID-19 patients, the largest clonal expansions were highly mutated, equivalent to the level observed in healthy control cohort. Such a secondary response to SARS-CoV-2 has been previously observed²⁵, and may be due to recall of B cells activated in response to previously circulating human coronaviruses, as recently highlighted^{26,27}.

[0152] We observed a potential relationship between repertoire characteristics and disease state, with improving patients showing a tendency towards a higher proportion of unmutated sequences. The increased prevalence of autoreactive IGHV4-34 sequences in improving COVID-19 patients compared to stable or deteriorating COVID-19 patients potentially suggests a role for natural or autoreactive antibodies in resolving infection and lower risk of pathology. However, this will need to be confirmed using larger sample cohorts. There is a clear need to expand on these findings by deepening the data pool and gathering more clinical data to aid understanding of the differences between individuals that respond with mild versus severe disease and have different recovery patterns. Building upon these observations could help to inform the future development of diagnostic assays to monitor and predict the progression of disease in infected patients.

[0153] A large number (777) of highly convergent clonotypes unique to COVID-19 were identified (see Table 1 and Table 2, which also include further convergent clonotypes from a separate set of samples). Our approach of subtracting the convergent clonotypes also observed in healthy controls¹⁵, allowed us to identify convergence specific to the disease cohort. The unbiased nature of the BCR repertoire analysis approach means that, whilst these convergent clonotypes are likely to include many antibodies to the spike protein and other parts of the virus they may also include other protective antibodies, including those to host proteins. It is expected that the heavy chains we have identified, and components of these heavy chains, will find utility in the treatment, prevention and diagnosis of COVID-19. Furthermore, characterisation of the heavy chains we have identified, coupled with matched light chains to generate functional antibodies will permit analysis of the binding sites and neutralising potential of these antibodies. The report that plasma derived from recently recovered donors with high neutralising antibody titres can improve the outcome of patients with severe disease²⁸, supports the hypotheses that intervention with a therapeutic antibody has the potential to be an effective treatment. A manufactured monoclonal antibody or combination of antibodies would also provide a simpler, scalable and safer approach than plasma therapy.

[0154] Sequence convergence between our 777 convergent clonotypes with heavy chains from published and patented SARS-CoV-1 and SARS-CoV-2 antibodies¹⁶ supports several observations. Firstly, it demonstrates that our approach of finding a convergent sequence signature is a useful method for enriching disease-specific antibodies, as we find matches to known SARS-CoV spike-binding antibodies. Secondly, it shows that the clonotypes observed in response to SARS-CoV-2 overlap with those to SARS-CoV-1, presumably explained by the relatively high homology of the two related viruses 3. Indeed, here we show that there is an overrepresentation of clonotypes that correlate with patient clinical symptoms than is expected by chance, and these BCR sequences are associated with the dominant IgA1 and IgG1 responses. Finally, it shows that the convergence extends beyond our UK COVID-19 disease cohort.

[0155] Further evidence for convergence extending beyond our disease cohort came from the comparisons of our 777 convergent clonotypes to deep sequencing datasets from China²³ and the USA¹⁴. The dataset from the USA is also from BCR sequencing of the peripheral blood of COVID-19 patients, and here we found matches to 405 of our 777 clonotypes. The dataset from China was from total RNA sequencing of the bronchoalveolar lavage fluid of SARS-CoV-2 infected patients. Only 16 unique CDRH3 sequences could be identified in this whole dataset, but one of them matched a convergent clonotype in the current study, showing that convergence can be seen both between different locations, and different sample types. We believe that the identification of such high BCR sequence convergence between geographically distinct and independent datasets could be highly significant and validates the disease association of the clonotypes, as well as the overall approach.

[0156] In summary, our BCR repertoire analysis provides information on the specific nature of the B cell response to SARS-CoV-2 infection. The information generated has the potential to facilitate the treatment of COVID-19 by supporting diagnostic approaches to predict the progression of disease, informing vaccine development and enabling the development of therapeutic antibody treatments and prophylactics.

### Materials and Methods

### Clinical Information Gathering

[0157] Peripheral blood was obtained from patients admitted with acute COVID-19 pneumonia to medical wards at Barts Health NHS Trust, London, UK, after informed consent by the direct care team (NHS HRA RES Ethics 19/SC/0361). Venous blood was collected in EDTA Vacutainers (BD). Patient demographics and clinical information relevant to their admission were collected by members of the direct care team, including duration of symptoms prior to blood sample collection. Current severity was mapped to the WHO Ordinal Scale of Severity. Whether patients at time of sample collection were clinically Improving, Stable or Deteriorating was subjectively determined by the direct clinical team prior to any sample analysis. This determination was primarily made on the basis of whether requirement for supplemental oxygen was increasing, stable, or decreasing comparing current day to previous three days.

### Sample Collection and Initial Processing

[0158] Blood samples were centrifuged at 150×g for 15 minutes at room temperature to separate plasma. The cell pellet was resuspended with phosphate-buffered saline (PBS without calcium and magnesium, Sigma) to 20 ml, layered onto 15 ml Ficoll-Paque Plus (GE Healthcare) and then centrifuged at 400×g for 30 minutes at room temperature without brake. Mononuclear cells (PBMCs) were extracted from the buffy coat and washed twice with PBS at 300×g for 8 min. PBMCs were counted with Trypan blue (Sigma) and viability of >96% was observed. 5×10⁶ PBMCs were resuspended in RLT (Qiagen) and incubated at room temperature for 10 min prior to storage at −80° C. Consecutive donor samples with sufficient RLT samples progressed to RNA preparation and BCR preparation and are included in this manuscript.

[0159] Metastatic breast cancer biopsy samples were collected and RNA extracted as part of a previously reported cohort²².

### RNA Prep & BCR Sequencing

[0160] Total RNA from 5×10⁶ PBMCs was isolated using RNeasy kits (Qiagen). First-strand cDNA was generated from total RNA using SuperScript RT IV (Invitrogen) and IgA and IgG isotype specific primers²⁹ including UMIs at 50° C. for 45 min (inactivation at 80° C. for 10 min).

[0161] The resulting cDNA was used as template for High Fidelity PCR amplification (KAPA, Roche) using a set of 6 FR1-specific forward primers²⁹ including sample-specific barcode sequences (6 bp) and a reverse primer specific to the RT primer (initial denaturation at 95° C. for 3 min, 25 cycles at 98° C. for 20 sec, 60° C. for 30 sec, 72° C. for 1 min and final extension at 72° C. for 7 min). The amount of Ig amplicons (˜450 bp) was quantified by TapeStation (Beckman Coulter) and gel-purified.

[0162] Dual-indexed sequencing adapters (KAPA) were ligated onto 500 ng amplicons per patient using the HyperPrep library construction kit (KAPA) and the adapter-ligated libraries were finally PCR-amplified for 3 cycles (98° C. for 15 sec, 60° C. for 30 sec, 72° C. for 30 sec, final extension at 72° C. for 1 min). Pools of 10 and 9 libraries were sequenced on an Illumina MiSeq using 2×300 bp chemistry.

### Sequence Processing

[0163] The Immcantation framework was used for sequence processing^{30,31} Briefly, paired-end reads were joined based on a minimum overlap of 20 nt, and a max error of 0.2, and reads with a mean phred score below 20 were removed. Primer regions, including UMIs and sample barcodes, were then identified within each read, and trimmed. Together, the sample barcode, UMI, and constant region primer were used to assign molecular groupings for each read. Within each grouping, usearch³², was used to subdivide the grouping, with a cutoff of 80% nucleotide identity, to account for randomly overlapping UMIs. Each of the resulting groupings is assumed to represent reads arising from a single RNA. Reads within each grouping were then aligned, and a consensus sequence determined.

[0164] For each processed sequence, IgBlast³³ was used to determine V, D and J gene segments, and locations of the CDRs and FWRs. Isotype was determined based on comparison to germline constant region sequences. Sequences annotated as unproductive by IgBlast were removed. The number of mutations within each sequence was determined using the shazam R package³¹.

[0165] Sequences were clustered to identify those arising from clonally related B cells; a process termed clonotyping. Sequences from all samples were clustered together to also identify convergent clusters between samples. Clustering was performed using a previously described algorithm³⁴. Clustering required identical V and J gene segment usage, identical CDRH3 length, and allowed 1 AA mismatch for every 10 AAs within the CDRH3. Cluster centers were defined as the most common sequence within the cluster. Lineages were reconstructed from clusters using the alakazam R package³⁵. The similarity tree of the convergent clonontype CDR3 sequences was generated through a kmer similarity matrix between sequences in R.

### Public Healthy Control Data Processing

[0166] The healthy control BCR sequence dataset used here has been described previously¹⁵. Only samples from participants aged 10 years or older, and from peripheral blood were used, resulting in a mean age of 28 (range: 11-51). Furthermore, only class-switched sequences were considered.

### Public SARS-CoV-2 Bronchoalveolar Lavage RNAseq Data Processing

[0167] The bronchoalveolar lavage data comes from a previously published study of SARS-CoV-2 infection²³ with data available under the PRJNA605983 BioProject on NCBI. MIXCR v3.0.3 was used, with default settings, to extract reads mapping to antibody genes from the total RNASeq data³⁶.

### Public CoV-AbDab Data Processing

[0168] All public CDRH3 AA sequences associated with published or patented SARS-CoV-1 or SARS-CoV-2 binding antibodies were mined from CoV-AbDab¹⁶, downloaded on 10 May 2020. A total of 80 non-redundant CDRH3s were identified (100% identity threshold). These sequences were then clustered alongside the representative CDRH3 sequence from each of our 777 convergent clones using CD-HIT³⁷, at an 80% sequence identity threshold (allowing at most a CDRH3 length mismatch of 1 AA). Cluster centres containing at least one CoV-AbDab CDRH3 and one convergent clone CDRH3 were further investigated.

### Public COVID-19 BCR Sequence Data Processing

[0169] The fourteen MiSeq “read 1” FASTQ datasets from the six SARS-CoV-2 patients analysed in Nielsen et al.¹⁴ were downloaded from the Sequence Read Archive³⁸. IgBlast³³ was used to identify heavy chain V, D, and J gene rearrangements and antibody regions. Unproductive sequences, sequences with out-of-frame V and J genes, and sequences missing the CDRH3 region were removed from the downstream analysis. Sequences with 100% amino acid and isotype matches were collapsed. To circumvent the disparity in collapsed dataset sizes between pairs of replicates, we selected the replicate with the highest number of sequences for downstream analysis.

### Convergent Clonotyping Matching to Public Repertoires

[0170] The public SARS-CoV-2-positive¹⁴ and healthy control BCR repertoires³⁹ were scanned for clonotype matches to our 777 convergent clonotype cluster centres. A BCR repertoire sequence was determined as a match if it had identical V and J genes, the same length CDRH3, and was within 1 AA mismatch per 10 CDRH3 AAs to a convergent clonotype representative sequence.

### Statistical Analysis and Graphing

[0171] Statistical analysis and plotting were performed using R⁴⁰. Plotting was performed using ggplot2⁴¹. Sequence logos were created using ggseqlogo⁴². Specific statistical tests used are detailed in the figure descriptions. Correlations of IGHV4-34 autoreactive motifs and convergent clonotypes was performed by manova in R.

### REFERENCES

[0172] 1. Lu, H., Stratton, C. W. & Tang, Y. W. Outbreak of pneumonia of unknown etiology in Wuhan, China: The mystery and the miracle. Journal of Medical Virology vol. 92 401-402 (2020).
[0173] 2. Huang, C. et al. Clinical features of patients infected with 2019 novel coronavirus in Wuhan, China. Lancet 395, 497-506 (2020).
[0174] 3. Wan, Y., Shang, J., Graham, R., Baric, R. S. & Li, F. Receptor Recognition by the Novel Coronavirus from Wuhan: an Analysis Based on Decade-Long Structural Studies of SARS Coronavirus. J. Virol. 94, (2020).
[0175] 4. Chen, N. et al. Epidemiological and clinical characteristics of 99 cases of 2019 novel coronavirus pneumonia in Wuhan, China: a descriptive study. Lancet 395, 507-513 (2020).
[0176] 5. Mulangu, S. et al. A randomized, controlled trial of Ebola virus disease therapeutics. N. Engl. J. Med. 381, 2293-2303 (2019).
[0177] 6. Gogtay, N. J. et al. Comparison of a Novel Human Rabies Monoclonal Antibody to Human Rabies Immunoglobulin for Postexposure Prophylaxis: A Phase 2/3, Randomized, Single-Blind, Noninferiority, Controlled Study. Clin. Infect. Dis. 66, 387-395 (2018).
[0178] 7. Johnson, S. et al. Development of a Humanized Monoclonal Antibody (MEDI-493) with Potent In Vitro and In Vivo Activity against Respiratory Syncytial Virus. J. Infect. Dis. 176, 1215-1224 (1997).
[0179] 8. Wang, S. F. et al. Antibody-dependent SARS coronavirus infection is mediated by antibodies against spike proteins. Biochem. Biophys. Res. Commun. 451, 208-214 (2014).
[0180] 9. Tetro, J. A. Is COVID-19 receiving ADE from other coronaviruses? Microbes Infect. 22, 72-73 (2020).
[0181] 10. Sharma, A. It is too soon to attribute ADE to COVID-19. Microbes and Infection (2020) doi:10.1016/j.micinf.2020.03.005.
[0182] 11. Wang, Q. et al. Immunodominant SARS coronavirus epitopes in humans elicited both enhancing and neutralizing effects on infection in non-human primates. ACS Infect. Dis. 2, 361-376 (2016).
[0183] 12. Brouwer, P. et al. Potent neutralizing antibodies from COVID-19 patients define multiple targets of vulnerability. bioRxiv (2020) doi:10.1101/2020.05.12.088716.
[0184] 13. Andreano, E. et al. Identification of neutralizing human monoclonal antibodies from Italian Covid-19 convalescent patients. bioRxiv (2020) doi:10.1101/2020.05.05.078154.
[0185] 14. Nielsen, S. et al. B cell clonal expansion and convergent antibody responses to SARS-CoV-2. Res. Sq. (2020) doi:10.21203/rs.3.rs-27220/v1.
[0186] 15. Ghraichy, M. et al. Maturation of naïve and antigen-experienced B-cell receptor repertoires with age. bioRxiv (2019) doi:10.1101/609651.
[0187] 16. Raybould, M. I. J., Kovaltsuk, A., Marks, C. & Deane, C. M. CoV-AbDab: the Coronavirus Antibody Database. bioRxiv (2020) doi:10.1101/2020.05.15.077313.
[0188] 17. Pascual, V. et al. Nucleotide sequence analysis of the V regions of two IgM cold agglutinins: Evidence that the V(H)4-21 gene segment is responsible for the major cross-reactive idiotype. J. Immunol. 146, 4385-4391 (1991).
[0189] 18. Schickel, J. N. et al. Self-reactive VH4-34-expressing IgG B cells recognizecommensal bacteria. J. Exp. Med. 214, 1991-2003 (2017).
[0190] 19. Tipton, C. M. et al. Diversity, cellular origin and autoreactivity of antibody-secreting cell population expansions in acute systemic lupus erythematosus. Nat. Immunol. 16, 755-765 (2015).
[0191] 20. Horns, F. et al. Lineage tracing of human B cells reveals the in vivo landscape of human antibody class switching. Elife 5, 1-20 (2016).
[0192] 21. Parameswaran, P. et al. Convergent Antibody Signatures in Human Dengue. Cell Host Microbe 13, 691-700 (2013).
[0193] 22. De Mattos-Arruda, L. et al. The Genomic and Immune Landscapes of Lethal Metastatic Breast Cancer. Cell Rep. 27, 2690-2708.e10 (2019).
[0194] 23. Zhou, P. et al. A pneumonia outbreak associated with a new coronavirus of probable bat origin. Nature 579, 270-273 (2020).
[0195] 24. Pinto, D. et al. Structural and functional analysis of a potent sarbecovirus neutralizing antibody. bioRxiv (2020) doi:10.1101/2020.04.07.023903.
[0196] 25. Wec, A. Z. et al. Broad sarbecovirus neutralizing antibodies define a key site of vulnerability on the SARS-CoV-2 spike protein. bioRxiv (2020) doi:10.1101/2020.05.15.096511.
[0197] 26. Grifoni, A. et al. Targets of T cell responses to SARS-CoV-2 coronavirus in humans with COVID-19 disease and unexposed individuals. Cell (2020) doi:10.1016/j.cell.2020.05.015.
[0198] 27. Ng, K. et al. Pre-existing and de novo humoral immunity to SARS-CoV-2 in humans. BioRxiv (2020) doi:10.1101/2020.05.14.095414.
[0199] 28. Duan, K. et al. Effectiveness of convalescent plasma therapy in severe COVID-19 patients. Proc. Natl. Acad. Sci. 117, 202004168 (2020).
[0200] 29. van Dongen, J. J. M. et al. Design and standardization of PCR primers and protocols for detection of clonal immunoglobulin and T-cell receptor gene recombinations in suspect lymphoproliferations: report of the BIOMED-2 Concerted Action BMH4-CT98-3936. Leukemia 17, 2257-317 (2003).
[0201] 30. Vander Heiden, J. A. et al. pRESTO: a toolkit for processing high-throughput sequencing raw reads of lymphocyte receptor repertoires. Bioinformatics 30, 1930-2 (2014).
[0202] 31. Gupta, N. T. et al. Change-O: A toolkit for analyzing large-scale B cell immunoglobulin repertoire sequencing data. Bioinformatics 31, 3356-3358 (2015).
[0203] 32. Edgar, R. C. Search and clustering orders of magnitude faster than BLAST. Bioinformatics 26, 2460-2461 (2010).
[0204] 33. Ye, J., Ma, N., Madden, T. L. & Ostell, J. M. IgBLAST: an immunoglobulin variable domain sequence analysis tool. Nucleic Acids Res. 41, W34-40 (2013).
[0205] 34. Galson, J. D. et al. BCR repertoire sequencing: different patterns of B cell activation after two Meningococcal vaccines. Immunol. Cell Biol. 93, 885-95 (2015).
[0206] 35. Vander Heiden, J. A. & Gupta, N. alakazam: Immunoglobulin Clonal Lineage and Diversity Analysis. R Packag. version 0.2.0 (2015).
[0207] 36. Bolotin, D. A. et al. MiXCR: software for comprehensive adaptive immunity profiling. Nat. Methods 12, 380-381 (2015).
[0208] 37. Fu, L., Niu, B., Zhu, Z., Wu, S. & Li, W. CD-HIT: Accelerated for clustering the next-generation sequencing data. Bioinformatics 28, 3150-3152 (2012).
[0209] 38. Leinonen, R., Sugawara, H. & Shumway, M. The sequence read archive. Nucleic Acids Res. 39, (2011).
[0210] 39. Briney, B., Inderbitzin, A., Joyce, C. & Burton, D. R. Commonality despite exceptional diversity in the baseline human antibody repertoire. Nature 566, 393-397 (2019).
[0211] 40. Team, R. D. C. R: A language and environment for statistical computing. R Found. Stat. Comput. Vienna, Austria (2008).
[0212] 41. Wickham, H. ggplot2: Elegant Graphics for Data Analysis. (Springer; 1st ed. 2009. Corr. 3rd printing 2010 edition, 2009).
[0213] 42. Wagih, O. Ggseqlogo: A versatile R package for drawing sequence logos. Bioinformatics 33, 3645-3647 (2017).
[0214] Throughout the specification and the claims which follow, unless the context requires otherwise, the word ‘comprise’, and variations such as ‘comprises’ and ‘comprising’, will be understood to imply the inclusion of a stated integer, step, group of integers or group of steps but not to the exclusion of any other integer, step, group of integers or group of steps. All patents and patent applications mentioned throughout the specification of the present invention are herein incorporated in their entirety by reference. The invention embraces all combinations of preferred and more preferred groups and suitable and more suitable groups and embodiments of groups recited above.

The application's sequence listing, which the Patent Office published only in electronic form, follows.

SEQUENCE LISTING (2020 sequences)

SEQ ID NO: 1 - protein, 116 aa, Artificial Sequence
  Synthetic polypeptide
QVQLVESGGGVVQPGRSLRLSCAASGFTFSSYAMHWVRQAPGKGLEWVAVISYDGSNKYYADSVKGRFTISRDNSKNTLYLQMNSLRAEDAVYYCARDGGGYMDVWGQGTTVTVSS

SEQ ID NO: 2 - protein, 25 aa, Artificial Sequence
  Synthetic peptide
QVQLVESGGGVVQPGRSLRLSCAAS

SEQ ID NO: 3 - protein, 25 aa, Artificial Sequence
  Synthetic peptide
QVQLQESGPGLVKPSETLSLTCSVS

SEQ ID NO: 4 - protein, 25 aa, Artificial Sequence [sequence omitted]

SEQ ID NO: 5 - protein, 25 aa, Artificial Sequence
  Synthetic peptide
EVQLVESGGGLVQPGGSLKLSCAAS

SEQ ID NO: 6 - protein, 25 aa, Artificial Sequence [sequence omitted]

SEQ ID NO: 7 - protein, 25 aa, Artificial Sequence
  Synthetic peptide
EVQLVESGGGLVKPGGSLRLSCAAS

SEQ ID NO: 8 - protein, 25 aa, Artificial Sequence
  Synthetic peptide
QVQLQESGPGLVKPSQTLSLTCTVS

SEQ ID NO: 9 - protein, 25 aa, Artificial Sequence
  Synthetic peptide
QVQLQESGPGLVKPSETLSLTCTVS

SEQ ID NO: 10 - protein, 25 aa, Artificial Sequence
  Synthetic peptide
QVQLQESGPGLVKPSETLSLTCTVP

SEQ ID NO: 11 - protein, 25 aa, Artificial Sequence
  Synthetic peptide
QLQLQESGPGLVKPSETLSLTCTVS

SEQ ID NO: 12 - protein, 25 aa, Artificial Sequence
  Synthetic peptide
EVQLLESGGGLVQPGGSLRLSCAAS

SEQ ID NO: 13 - protein, 25 aa, Artificial Sequence
  Synthetic peptide
EVQLVQSGAEVKKPGESLKISCKAP

SEQ ID NO: 14 - protein, 25 aa, Artificial Sequence [sequence omitted]

SEQ ID NO: 15 - protein, 25 aa, Artificial Sequence [sequence omitted]

SEQ ID NO: 16 - protein, 25 aa, Artificial Sequence
  Synthetic peptide
QVQLQESGPGLVKPSGTLSLTCAVS

SEQ ID NO: 17 - protein, 25 aa, Artificial Sequence
  Synthetic peptide
EVQLVQSGAEVKKPGESLKISCKGS

SEQ ID NO: 18 - protein, 25 aa, Artificial Sequence [sequence omitted]

SEQ ID NO: 19 - protein, 25 aa, Artificial Sequence
  Synthetic peptide
EVQLVESGGGLVQPGGSLRLSCEAS

SEQ ID NO: 20 - protein, 25 aa, Artificial Sequence
  Synthetic peptide
QVQLVESGGGLVKPGGSLRLSCAAS

SEQ ID NO: 21 - protein, 25 aa, Artificial Sequence
  Synthetic peptide
EVQLVESGGGLIQPGGSLRLSCAAS

SEQ ID NO: 22 - protein, 25 aa, Artificial Sequence
  Synthetic peptide
QLQLQESGSGLVKPSQTLSLTCAVS

SEQ ID NO: 23 - protein, 25 aa, Artificial Sequence
  Synthetic peptide
QVQLVQSGAEVKKPGASVKVSCKAF

SEQ ID NO: 24 - protein, 25 aa, Artificial Sequence
  Synthetic peptide
QITLKESGPTLVKPTQTLTLTCTFS

SEQ ID NO: 25 - protein, 25 aa, Artificial Sequence
  Synthetic peptide
RVTLRESGPALVKPTQTLTLTCTFS

SEQ ID NO: 26 - protein, 25 aa, Artificial Sequence
  Synthetic peptide
QVQLVESGGGVVQPGRSLRLSCAAF

SEQ ID NO: 27 - protein, 25 aa, Artificial Sequence
  Synthetic peptide
QITLKESGPTLVKPTQTLTLTCSFS

SEQ ID NO: 28 - protein, 25 aa, Artificial Sequence
  Synthetic peptide
EVQLVESGGGLVQPGRSLRLSCTAS

SEQ ID NO: 29 - protein, 25 aa, Artificial Sequence
  Synthetic peptide
QVTLKESGPVLVKPTETLTLTCTVS

SEQ ID NO: 30 - protein, 25 aa, Artificial Sequence
  Synthetic peptide
QVQLVQSGAEVKKPGASVKVSCKVS

SEQ ID NO: 31 - protein, 25 aa, Artificial Sequence
  Synthetic peptide
QMQLVQSGPEVKKPGTSVKVSCKAS

SEQ ID NO: 32 - protein, 25 aa, Artificial Sequence
  Synthetic peptide
QVQLVESGGGVVQPGRSLRLSCAGS

SEQ ID NO: 33 - protein, 25 aa, Artificial Sequence
  Synthetic peptide
QVTLRESGPALVKPTQTLTLTCTFS

SEQ ID NO: 34 - protein, 25 aa, Artificial Sequence
  Synthetic peptide
QVQLVESGGGVVQPGRSLRLSCAAP

SEQ ID NO: 35 - protein, 25 aa, Artificial Sequence
  Synthetic peptide
EVQLVESGGVVVQPGGSLRLSCAAS

SEQ ID NO: 36 - protein, 25 aa, Artificial Sequence
  Synthetic peptide
QVQLVESGGGVVQPGGSLRLSCAAS

SEQ ID NO: 37 - protein, 25 aa, Artificial Sequence
  Synthetic peptide
EVQLVQSGAEVKKPGESLRISCKGS

SEQ ID NO: 38 - protein, 8 aa, Artificial Sequence
  Synthetic peptide
GFTFSSYA

SEQ ID NO: 39 - protein, 8 aa, Artificial Sequence
  Synthetic peptide
GFTFSSYG

SEQ ID NO: 40 - protein, 8 aa, Artificial Sequence
  Synthetic peptide
GGSISGYY

SEQ ID NO: 41 - protein, 8 aa, Artificial Sequence
  Synthetic peptide
GDNFNSFA

SEQ ID NO: 42 - protein, 8 aa, Artificial Sequence
  Synthetic peptide
GFTFSGSA

SEQ ID NO: 43 - protein, 8 aa, Artificial Sequence
  Synthetic peptide
GFTFSSYW

SEQ ID NO: 44 - protein, 8 aa, Artificial Sequence
  Synthetic peptide
GFTFSNAW

SEQ ID NO: 45 - protein, 8 aa, Artificial Sequence
  Synthetic peptide
GFTYSNFA

SEQ ID NO: 46 - protein, 10 aa, Artificial Sequence
  Synthetic peptide
GASFSSGTYY

SEQ ID NO: 47 - protein, 8 aa, Artificial Sequence
  Synthetic peptide
GGSISSYY

SEQ ID NO: 48 - protein, 8 aa, Artificial Sequence
  Synthetic peptide
GFPFSNAW

SEQ ID NO: 49 - protein, 10 aa, Artificial Sequence
  Synthetic peptide
GNSISRTSYY

SEQ ID NO: 50 - protein, 8 aa, Artificial Sequence
  Synthetic peptide
GFTFSRYD

SEQ ID NO: 51 - protein, 8 aa, Artificial Sequence
  Synthetic peptide
GYSFTTSW

SEQ ID NO: 52 - protein, 8 aa, Artificial Sequence
  Synthetic peptide
GYTFTDYY

SEQ ID NO: 53 - protein, 8 aa, Artificial Sequence
  Synthetic peptide
GGSFSNIY

SEQ ID NO: 54 - protein, 8 aa, Artificial Sequence
  Synthetic peptide
GGSFSGYQ

SEQ ID NO: 55 - protein, 9 aa, Artificial Sequence
  Synthetic peptide
GGSISSSNW

SEQ ID NO: 56 - protein, 8 aa, Artificial Sequence
  Synthetic peptide
GYSFTSFG

SEQ ID NO: 57 - protein, 8 aa, Artificial Sequence
  Synthetic peptide
GYTFTSYD

SEQ ID NO: 58 - protein, 8 aa, Artificial Sequence
  Synthetic peptide
GFTFSSYS

SEQ ID NO: 59 - protein, 8 aa, Artificial Sequence
  Synthetic peptide
GFTVSSNY

SEQ ID NO: 60 - protein, 8 aa, Artificial Sequence
  Synthetic peptide
GFVFSDYW

SEQ ID NO: 61 - protein, 8 aa, Artificial Sequence
  Synthetic peptide
GYSFTSYW

SEQ ID NO: 62 - protein, 8 aa, Artificial Sequence
  Synthetic peptide
GFTFDDYS

SEQ ID NO: 63 - protein, 8 aa, Artificial Sequence
  Synthetic peptide
GYSFTNYW

SEQ ID NO: 64 - protein, 8 aa, Artificial Sequence
  Synthetic peptide
GFRFSSYW

SEQ ID NO: 65 - protein, 8 aa, Artificial Sequence
  Synthetic peptide
GFTFSDYY

SEQ ID NO: 66 - protein, 8 aa, Artificial Sequence
  Synthetic peptide
GGSFSGYY

SEQ ID NO: 67 - protein, 10 aa, Artificial Sequence
  Synthetic peptide
GGSISSGGYS

SEQ ID NO: 68 - protein, 8 aa, Artificial Sequence
  Synthetic peptide
GFTFSNDG

SEQ ID NO: 69 - protein, 8 aa, Artificial Sequence
  Synthetic peptide
GYNFSSYG

SEQ ID NO: 70 - protein, 8 aa, Artificial Sequence
  Synthetic peptide
GYTFTSYG

SEQ ID NO: 71 - protein, 8 aa, Artificial Sequence
  Synthetic peptide
GGTFSNYA

SEQ ID NO: 72 - protein, 10 aa, Artificial Sequence
  Synthetic peptide
GFSLSTSGVG

SEQ ID NO: 73 - protein, 8 aa, Artificial Sequence
  Synthetic peptide
GFTFNNYA

SEQ ID NO: 74 - protein, 10 aa, Artificial Sequence
  Synthetic peptide
GFSLSTSGMC

SEQ ID NO: 75 - protein, 8 aa, Artificial Sequence
  Synthetic peptide
GFIFSNFG

SEQ ID NO: 76 - protein, 8 aa, Artificial Sequence
  Synthetic peptide
GYTFTSYY

SEQ ID NO: 77 - protein, 8 aa, Artificial Sequence
  Synthetic peptide
GFTFSFYA

SEQ ID NO: 78 - protein, 10 aa, Artificial Sequence
  Synthetic peptide
GGSFRNSTHH

SEQ ID NO: 79 - protein, 9 aa, Artificial Sequence
  Synthetic peptide
GGSISSTYW

SEQ ID NO: 80 - protein, 8 aa, Artificial Sequence
  Synthetic peptide
GFIFSSYW

SEQ ID NO: 81 - protein, 10 aa, Artificial Sequence
  Synthetic peptide
GFSFSSPGVN

SEQ ID NO: 82 - protein, 8 aa, Artificial Sequence
  Synthetic peptide
GFFFSNYG

SEQ ID NO: 83 - protein, 8 aa, Artificial Sequence
  Synthetic peptide
GFTFSNYP

SEQ ID NO: 84 - protein, 8 aa, Artificial Sequence
  Synthetic peptide
GYTFTGYY

SEQ ID NO: 85 - protein, 8 aa, Artificial Sequence
  Synthetic peptide
GFTFSFYS

SEQ ID NO: 86 - protein, 8 aa, Artificial Sequence
  Synthetic peptide
GFTFSNYA

SEQ ID NO: 87 - protein, 8 aa, Artificial Sequence
  Synthetic peptide
GFTFSTYG

SEQ ID NO: 88 - protein, 10 aa, Artificial Sequence
  Synthetic peptide
GGSISSSSYY

SEQ ID NO: 89 - protein, 8 aa, Artificial Sequence
  Synthetic peptide
GFTFGDYA

SEQ ID NO: 90 - protein, 8 aa, Artificial Sequence
  Synthetic peptide
GGTFSSYA

SEQ ID NO: 91 - protein, 8 aa, Artificial Sequence
  Synthetic peptide
GFTFSIYA

SEQ ID NO: 92 - protein, 8 aa, Artificial Sequence
  Synthetic peptide
GFTFDDYA

SEQ ID NO: 93 - protein, 8 aa, Artificial Sequence
  Synthetic peptide
GFIFSNYA

SEQ ID NO: 94 - protein, 10 aa, Artificial Sequence
  Synthetic peptide
GFSLSNARMG

SEQ ID NO: 95 - protein, 8 aa, Artificial Sequence
  Synthetic peptide
GFTFSTSA

SEQ ID NO: 96 - protein, 8 aa, Artificial Sequence
  Synthetic peptide
GFTFRSYA

SEQ ID NO: 97 - protein, 8 aa, Artificial Sequence
  Synthetic peptide
GFTFSGYA

SEQ ID NO: 98 - protein, 8 aa, Artificial Sequence
  Synthetic peptide
GYTLTELS

SEQ ID NO: 99 - protein, 8 aa, Artificial Sequence
  Synthetic peptide
GFTFGSYG

SEQ ID NO: 100 - protein, 8 aa, Artificial Sequence
  Synthetic peptide
GFTFTSSA

SEQ ID NO: 101 - protein, 8 aa, Artificial Sequence
  Synthetic peptide
GFTFSTYA

SEQ ID NO: 102 - protein, 8 aa, Artificial Sequence
  Synthetic peptide
GFTFSSNG

SEQ ID NO: 103 - protein, 8 aa, Artificial Sequence
  Synthetic peptide
GFNFGDYA

SEQ ID NO: 104 - protein, 8 aa, Artificial Sequence
  Synthetic peptide
GFPFSSFA

SEQ ID NO: 105 - protein, 8 aa, Artificial Sequence
  Synthetic peptide
GFTFTSYG

SEQ ID NO: 106 - protein, 8 aa, Artificial Sequence
  Synthetic peptide
GFTFSSYD

SEQ ID NO: 107 - protein, 8 aa, Artificial Sequence
  Synthetic peptide
GYIFSSYA

SEQ ID NO: 108 - protein, 8 aa, Artificial Sequence
  Synthetic peptide
GFTFSSYE

SEQ ID NO: 109 - protein, 10 aa, Artificial Sequence
  Synthetic peptide
GGSISSGGYY

SEQ ID NO: 110 - protein, 8 aa, Artificial Sequence
  Synthetic peptide
GFTFSTYS

SEQ ID NO: 111 - protein, 8 aa, Artificial Sequence
  Synthetic peptide
GFIFSSYA

SEQ ID NO: 112 - protein, 8 aa, Artificial Sequence
  Synthetic peptide
GFTLSSYA

SEQ ID NO: 113 - protein, 8 aa, Artificial Sequence
  Synthetic peptide
GFTFSYNA

SEQ ID NO: 114 - protein, 8 aa, Artificial Sequence
  Synthetic peptide
GFSFSDYW

SEQ ID NO: 115 - protein, 8 aa, Artificial Sequence
  Synthetic peptide
GITVSTNY

SEQ ID NO: 116 - protein, 8 aa, Artificial Sequence
  Synthetic peptide
GYSFSDYW

SEQ ID NO: 117 - protein, 8 aa, Artificial Sequence
  Synthetic peptide
GFTFDDYT

SEQ ID NO: 118 - protein, 8 aa, Artificial Sequence
  Synthetic peptide
GGSISSHY

SEQ ID NO: 119 - protein, 8 aa, Artificial Sequence
  Synthetic peptide
GGTFSSYT

SEQ ID NO: 120 - protein, 8 aa, Artificial Sequence
  Synthetic peptide
GFIFDSYA

SEQ ID NO: 121 - protein, 8 aa, Artificial Sequence
  Synthetic peptide
GGSISSDY

SEQ ID NO: 122 - protein, 8 aa, Artificial Sequence
  Synthetic peptide
GRSFSGYY

SEQ ID NO: 123 - protein, 8 aa, Artificial Sequence
  Synthetic peptide
GGTFSTYA

SEQ ID NO: 124 - protein, 10 aa, Artificial Sequence
  Synthetic peptide
GGSISSSGYY

SEQ ID NO: 125 - protein, 8 aa, Artificial Sequence
  Synthetic peptide
GFTFSSYR

SEQ ID NO: 126 - protein, 8 aa, Artificial Sequence
  Synthetic peptide
GGSIRSYS

SEQ ID NO: 127 - protein, 8 aa, Artificial Sequence
  Synthetic peptide
GFTFSNYW

SEQ ID NO: 128 - protein, 8 aa, Artificial Sequence
  Synthetic peptide
EGTFNSYA

SEQ ID NO: 129 - protein, 8 aa, Artificial Sequence
  Synthetic peptide
GFTFTTYW

SEQ ID NO: 130 - protein, 8 aa, Artificial Sequence
  Synthetic peptide
GFSFSTYA

SEQ ID NO: 131 - protein, 10 aa, Artificial Sequence
  Synthetic peptide
GGSVSSGSYY

SEQ ID NO: 132 - protein, 8 aa, Artificial Sequence
  Synthetic peptide
GLTFSSYW

SEQ ID NO: 133 - protein, 8 aa, Artificial Sequence
  Synthetic peptide
GCTFSSYG

SEQ ID NO: 134 - protein, 8 aa, Artificial Sequence
  Synthetic peptide
GASFSGYY

SEQ ID NO: 135 - protein, 17 aa, Artificial Sequence
  Synthetic peptide
MHWVRQAPGKGLEWVAV

SEQ ID NO: 136 - protein, 17 aa, Artificial Sequence
  Synthetic peptide
WSWIRQAPGKGLEWIAF

SEQ ID NO: 137 - protein, 17 aa, Artificial Sequence
  Synthetic peptide
FNWVRQAPGQGLEWIGG

SEQ ID NO: 138 - protein, 17 aa, Artificial Sequence
  Synthetic peptide
MHWVRQASGKGLEWVGR

SEQ ID NO: 139 - protein, 17 aa, Artificial Sequence
  Synthetic peptide
MHWVRQAPGKGLVWVSR

SEQ ID NO: 140 - protein, 17 aa, Artificial Sequence
  Synthetic peptide
MSWVRQAPGKGLEWVGR

SEQ ID NO: 141 - protein, 17 aa, Artificial Sequence
  Synthetic peptide
MHWVRQAPGKGLEWVAL

SEQ ID NO: 142 - protein, 17 aa, Artificial Sequence
  Synthetic peptide
WTWVRQAAGKGLEWIGR

SEQ ID NO: 143 - protein, 17 aa, Artificial Sequence
  Synthetic peptide
WSWIRQPPGKGLEWIGY

SEQ ID NO: 144 - protein, 17 aa, Artificial Sequence
  Synthetic peptide
WTWIRQSPGKGLDWIGY

SEQ ID NO: 145 - protein, 17 aa, Artificial Sequence
  Synthetic peptide
WGWIRQPPGKGLEWIGS

SEQ ID NO: 146 - protein, 17 aa, Artificial Sequence
  Synthetic peptide
MSWVRQAPGKGLEWVSA

SEQ ID NO: 147 - protein, 17 aa, Artificial Sequence
  Synthetic peptide
IAWVRQMPGKGLEWMGI

SEQ ID NO: 148 - protein, 17 aa, Artificial Sequence
  Synthetic peptide
MHWVRQAPGQGLEWMGW

SEQ ID NO: 149 - protein, 17 aa, Artificial Sequence
  Synthetic peptide
WTWIRQPPEKGLEWIGE

SEQ ID NO: 150 - protein, 17 aa, Artificial Sequence
  Synthetic peptide
WSWVRQSPGKGLEWIGQ

SEQ ID NO: 151 - protein, 17 aa, Artificial Sequence
  Synthetic peptide
WSWVRQPPGKGLEWIGE

SEQ ID NO: 152 - protein, 17 aa, Artificial Sequence
  Synthetic peptide
ITWVRQAPGQGLEWMGY

SEQ ID NO: 153 - protein, 17 aa, Artificial Sequence
  Synthetic peptide
ISWVRQATGQGLQWMGW

SEQ ID NO: 154 - protein, 17 aa, Artificial Sequence
  Synthetic peptide
MNWVRQAPGKGLEWVSY

SEQ ID NO: 155 - protein, 17 aa, Artificial Sequence
  Synthetic peptide
MSWVRQAPGKGLEWVSV

SEQ ID NO: 156 - protein, 17 aa, Artificial Sequence
  Synthetic peptide
MHWVRQTPGKGLVWVSC

SEQ ID NO: 157 - protein, 17 aa, Artificial Sequence
  Synthetic peptide
IGWVRQMPGKGLEWMGI

SEQ ID NO: 158 - protein, 17 aa, Artificial Sequence
  Synthetic peptide
MHWVRQAPGKGLEWVSG

SEQ ID NO: 159 - protein, 17 aa, Artificial Sequence
  Synthetic peptide
MHWVRQTPEKGLVWVSH

SEQ ID NO: 160 - protein, 17 aa, Artificial Sequence
  Synthetic peptide
MCWIRQAPGKRLEYISY

SEQ ID NO: 161 - protein, 17 aa, Artificial Sequence
  Synthetic peptide
WSWIRQPPGKGLEWIGE

SEQ ID NO: 162 - protein, 17 aa, Artificial Sequence
  Synthetic peptide
MHWVRQAPGKGLEWVTV

SEQ ID NO: 163 - protein, 17 aa, Artificial Sequence
  Synthetic peptide
LTWVRQAPGQGFEWMGW

SEQ ID NO: 164 - protein, 17 aa, Artificial Sequence
  Synthetic peptide
ISWVRQAPGQGLEWMGW

SEQ ID NO: 165 - protein, 17 aa, Artificial Sequence
  Synthetic peptide
ISWVRQAPGQGPEWMGG

SEQ ID NO: 166 - protein, 17 aa, Artificial Sequence
  Synthetic peptide
VGWIRQPPGKALEWLAL

SEQ ID NO: 167 - protein, 17 aa, Artificial Sequence
  Synthetic peptide
VSWIRQPPGKALEWLAR

SEQ ID NO: 168 - protein, 17 aa, Artificial Sequence
  Synthetic peptide
MHWVRQAPGKGLEWVAA

SEQ ID NO: 169 - protein, 17 aa, Artificial Sequence
  Synthetic peptide
MNWVRQAPGKGLEWVSS

SEQ ID NO: 170 - protein, 17 aa, Artificial Sequence
  Synthetic peptide
MHWVRQAPGQGLEWMGI

SEQ ID NO: 171 - protein, 17 aa, Artificial Sequence
  Synthetic peptide
MSWVRQAPGKGLEWVAN

SEQ ID NO: 172 - protein, 17 aa, Artificial Sequence
  Synthetic peptide
LHWVRQAPGKGLEWVAV

SEQ ID NO: 173 - protein, 17 aa, Artificial Sequence
  Synthetic peptide
MSWVRQAPGQGLEWVSV

SEQ ID NO: 174 - protein, 17 aa, Artificial Sequence
  Synthetic peptide
WGWIRQPPGRGLEWIGN

SEQ ID NO: 175 - protein, 17 aa, Artificial Sequence
  Synthetic peptide
WSWIRQPAGKGLEWIGR

SEQ ID NO: 176 - protein, 17 aa, Artificial Sequence
  Synthetic peptide
MHWVRQSPGKGLEWVAV

SEQ ID NO: 177 - protein, 17 aa, Artificial Sequence
  Synthetic peptide
LHWVRQAPGKGLEWVTI

SEQ ID NO: 178 - protein, 17 aa, Artificial Sequence
  Synthetic peptide
MSWVRQAPGKGLEWVGF

SEQ ID NO: 179 - protein, 17 aa, Artificial Sequence
  Synthetic peptide
ISWVRQAPGQGLEWMGR

SEQ ID NO: 180 - protein, 17 aa, Artificial Sequence
  Synthetic peptide
MHWVRQVPGKGLEWVSG

SEQ ID NO: 181 - protein, 17 aa, Artificial Sequence
  Synthetic peptide
IHWVRQAPGKGLEWVAV

SEQ ID NO: 182 - protein, 17 aa, Artificial Sequence
  Synthetic peptide
VSWIRQPPGKALEWLAH

SEQ ID NO: 183 - protein, 17 aa, Artificial Sequence
  Synthetic peptide
MNWVRQAPGKGLEWVSV

SEQ ID NO: 184 - protein, 17 aa, Artificial Sequence
  Synthetic peptide
MHWVRQAPGKGLEWMGG

SEQ ID NO: 185 - protein, 17 aa, Artificial Sequence
  Synthetic peptide
VQWVRQARGQRLEWIGW

SEQ ID NO: 186 - protein, 17 aa, Artificial Sequence
  Synthetic peptide
MSWIRQAPGKGLEWVSY

SEQ ID NO: 187 - protein, 17 aa, Artificial Sequence
  Synthetic peptide
MHWVRQAPGKGLEWVEV

SEQ ID NO: 188 - protein, 17 aa, Artificial Sequence
  Synthetic peptide
MHWVRQAPGKGLEWVGV

SEQ ID NO: 189 - protein, 17 aa, Artificial Sequence
  Synthetic peptide
MHWVRQAPGKGLDWVAI

SEQ ID NO: 190 - protein, 17 aa, Artificial Sequence
  Synthetic peptide
MHWVRQATGKGLEWVSA

SEQ ID NO: 191 - protein, 17 aa, Artificial Sequence
  Synthetic peptide
IHWVRQPPGRGLEWVAV

SEQ ID NO: 192 - protein, 17 aa, Artificial Sequence
  Synthetic peptide
VSWIRQPPGKALEWLAL

SEQ ID NO: 193 - protein, 17 aa, Artificial Sequence
  Synthetic peptide
MYWVRQAPGKGLEWVAV

SEQ ID NO: 194 - protein, 17 aa, Artificial Sequence
  Synthetic peptide
WSWIRQHPGKGLEWIGY

SEQ ID NO: 195 - protein, 17 aa, Artificial Sequence
  Synthetic peptide
MHWVRQAPGMGLEWVAV

SEQ ID NO: 196 - protein, 17 aa, Artificial Sequence
  Synthetic peptide
  MOD_RES (17)..(17): Any amino acid
MHWVRQAPGKGLEWVAX

SEQ ID NO: 197 - protein, 17 aa, Artificial Sequence
  Synthetic peptide
MHWVRPAPGKGPQWVAV

SEQ ID NO: 198 - protein, 17 aa, Artificial Sequence
  Synthetic peptide
VAWVRQMPGKGLEWMGI

SEQ ID NO: 199 - protein, 17 aa, Artificial Sequence
  Synthetic peptide
ISWVRQAPGQGLEWMGG

SEQ ID NO: 200 - protein, 17 aa, Artificial Sequence
  Synthetic peptide
MHWVRQAPGKGLEWVSL

SEQ ID NO: 201 - protein, 17 aa, Artificial Sequence
  Synthetic peptide
MHWVRQAPGKGPEWVAV

SEQ ID NO: 202 - protein, 17 aa, Artificial Sequence
  Synthetic peptide
MHWVRQAPGKGMEWVAV

SEQ ID NO: 203 - protein, 17 aa, Artificial Sequence
  Synthetic peptide
MHWVRQAPGKGLEWVAF

SEQ ID NO: 204 - protein, 17 aa, Artificial Sequence
  Synthetic peptide
MNWVRQAPGKGLEWVAY

SEQ ID NO: 205 - protein, 17 aa, Artificial Sequence
  Synthetic peptide
ISWVRQAPGQGREGMGG

SEQ ID NO: 206 - protein, 17 aa, Artificial Sequence
  Synthetic peptide
INWVRQAPGQGLEWMGG

SEQ ID NO: 207 - protein, 17 aa, Artificial Sequence
  Synthetic peptide
ISWVRQMPGKGLEWMGR

SEQ ID NO: 208 - protein, 17 aa, Artificial Sequence
  Synthetic peptide
WDWLRQPPRKGLEWIGT

SEQ ID NO: 209 - protein, 17 aa, Artificial Sequence
  Synthetic peptide
WTWIRQPPGKGLEWIGE

SEQ ID NO: 210 - protein, 17 aa, Artificial Sequence
  Synthetic peptide
WSWIRQPPGKELEWIGY

SEQ ID NO: 211 - protein, 17 aa, Artificial Sequence
  Synthetic peptide
WSWIRQPPGKGLEWIGS

SEQ ID NO: 212 - protein, 17 aa, Artificial Sequence
  Synthetic peptide
MTWVRQAPGKGLEWVAN

SEQ ID NO: 213 - protein, 17 aa, Artificial Sequence
  Synthetic peptide
MSWVRQAPGKGLEWVST

SEQ ID NO: 214 - protein, 17 aa, Artificial Sequence
  Synthetic peptide
MHWVRQVPGKGLVWVSR

SEQ ID NO: 215 - protein, 17 aa, Artificial Sequence
  Synthetic peptide
ISWVRQAPGQGLEWTGW

SEQ ID NO: 216 - protein, 8 aa, Artificial Sequence
  Synthetic peptide
ISYDGSNK

SEQ ID NO: 217 - protein, 7 aa, Artificial Sequence
  Synthetic peptide
IDESGST

SEQ ID NO: 218 - protein, 8 aa, Artificial Sequence
  Synthetic peptide
IWYDGSNK

SEQ ID NO: 219 - protein, 8 aa, Artificial Sequence
  Synthetic peptide
IMPLFGTT

SEQ ID NO: 220 - protein, 10 aa, Artificial Sequence
  Synthetic peptide
IRSKANSYAT

SEQ ID NO: 221 - protein, 8 aa, Artificial Sequence
  Synthetic peptide
INSDGSST

SEQ ID NO: 222 - protein, 10 aa, Artificial Sequence
  Synthetic peptide
IKSKTDGGTT

SEQ ID NO: 223 - protein, 8 aa, Artificial Sequence
  Synthetic peptide
ISYDGGLK

SEQ ID NO: 224 - protein, 7 aa, Artificial Sequence
  Synthetic peptide
LHTRGRT

SEQ ID NO: 225 - protein, 7 aa, Artificial Sequence
  Synthetic peptide
IYYSGST

SEQ ID NO: 226 - protein, 10 aa, Artificial Sequence
  Synthetic peptide
IKSKTDGGTI

SEQ ID NO: 227 - protein, 7 aa, Artificial Sequence
  Synthetic peptide
VFYSGRT

SEQ ID NO: 228 - protein, 8 aa, Artificial Sequence
  Synthetic peptide
ISTSGVNT

SEQ ID NO: 229 - protein, 8 aa, Artificial Sequence
  Synthetic peptide
IYPGDSDT

SEQ ID NO: 230 - protein, 8 aa, Artificial Sequence
  Synthetic peptide
INPNSGGT

SEQ ID NO: 231 - protein, 7 aa, Artificial Sequence
  Synthetic peptide
INHTGST

SEQ ID NO: 232 - protein, 7 aa, Artificial Sequence
  Synthetic peptide
IYHSGST

SEQ ID NO: 233 - protein, 8 aa, Artificial Sequence
  Synthetic peptide
ISAHNGNS

SEQ ID NO: 234 - protein, 8 aa, Artificial Sequence
  Synthetic peptide
MNPNSGNT

SEQ ID NO: 235 - protein, 8 aa, Artificial Sequence
  Synthetic peptide
ISSSSSTI

SEQ ID NO: 236 - protein, 7 aa, Artificial Sequence
  Synthetic peptide
IYSGGST

SEQ ID NO: 237 - protein, 8 aa, Artificial Sequence
  Synthetic peptide
INIDGSGI

SEQ ID NO: 238 - protein, 8 aa, Artificial Sequence
  Synthetic peptide
ISWNSGSI

SEQ ID NO: 239 - protein, 8 aa, Artificial Sequence
  Synthetic peptide
IYPGDSDA

SEQ ID NO: 240 - protein, 8 aa, Artificial Sequence
  Synthetic peptide
IDSDGGRP

SEQ ID NO: 241 - protein, 8 aa, Artificial Sequence
  Synthetic peptide
ISGSGSVT

SEQ ID NO: 242 - protein, 7 aa, Artificial Sequence
  Synthetic peptide
INHSGST

SEQ ID NO: 243 - protein, 8 aa, Artificial Sequence
  Synthetic peptide
ISSDGSHE

SEQ ID NO: 244 - protein, 8 aa, Artificial Sequence
  Synthetic peptide
ITTNNGKT

SEQ ID NO: 245 - protein, 8 aa, Artificial Sequence
  Synthetic peptide
ISAYNGNT

SEQ ID NO: 246 - protein, 8 aa, Artificial Sequence
  Synthetic peptide
ITAIVQTL

SEQ ID NO: 247 - protein, 7 aa, Artificial Sequence
  Synthetic peptide
IYWDDDK

SEQ ID NO: 248 - protein, 8 aa, Artificial Sequence
  Synthetic peptide
ISYDGILK

SEQ ID NO: 249 - protein, 7 aa, Artificial Sequence
  Synthetic peptide
IDWDDDK

SEQ ID NO: 250 - protein, 8 aa, Artificial Sequence
  Synthetic peptide
LWYDGTKK

SEQ ID NO: 251 - protein, 8 aa, Artificial Sequence
  Synthetic peptide
ISSSSSYI

SEQ ID NO: 252 - protein, 8 aa, Artificial Sequence
  Synthetic peptide
INPSGGST

SEQ ID NO: 253 - protein, 8 aa, Artificial Sequence
  Synthetic peptide
IKQDGSEK

SEQ ID NO: 254 - protein, 8 aa, Artificial Sequence
  Synthetic peptide
ISGSGGST

SEQ ID NO: 255 - protein, 7 aa, Artificial Sequence
  Synthetic peptide
IHHSGST

SEQ ID NO: 256 - protein, 7 aa, Artificial Sequence
  Synthetic peptide
IYTSGST

SEQ ID NO: 257 - protein, 8 aa, Artificial Sequence
  Synthetic peptide
ISFDGFNK

SEQ ID NO: 258 - protein, 8 aa, Artificial Sequence
  Synthetic peptide
IWYDGSNT

SEQ ID NO: 259 - protein, 8 aa, Artificial Sequence
  Synthetic peptide
LSYDGSNK

SEQ ID NO: 260 - protein, 10 aa, Artificial Sequence
  Synthetic peptide
IRSKAYGGTT

SEQ ID NO: 261 - protein, 8 aa, Artificial Sequence
  Synthetic peptide
IIPILGIA

SEQ ID NO: 262 - protein, 8 aa, Artificial Sequence
  Synthetic peptide
ISWNSGDI

SEQ ID NO: 263 - protein, 8 aa, Artificial Sequence
  Synthetic peptide
ISYDGSGQ

SEQ ID NO: 264 - protein, 7 aa, Artificial Sequence
  Synthetic peptide
IFSNDEK

SEQ ID NO: 265 - protein, 8 aa, Artificial Sequence
  Synthetic peptide
ISYDGNNE

SEQ ID NO: 266 - protein, 8 aa, Artificial Sequence
  Synthetic peptide
FSGSGGVA

SEQ ID NO: 267 - protein, 8 aa, Artificial Sequence
  Synthetic peptide
FDPEDGET

SEQ ID NO: 268 - protein, 8 aa, Artificial Sequence
  Synthetic peptide
IWYDGRNK

SEQ ID NO: 269 - protein, 7 aa, Artificial Sequence
  Synthetic peptide
IYYSGRT

SEQ ID NO: 270 - protein, 8 aa, Artificial Sequence
  Synthetic peptide
IVVGSGNT

SEQ ID NO: 271 - protein, 8 aa, Artificial Sequence
  Synthetic peptide
IWYDGSKK

SEQ ID NO: 272 - protein, 8 aa, Artificial Sequence
  Synthetic peptide
ISSSGSTI

SEQ ID NO: 273 - protein, 8 aa, Artificial Sequence
  Synthetic peptide
IWYDGSNE

SEQ ID NO: 274 - protein, 8 aa, Artificial Sequence
  Synthetic peptide
ISFDGRNK

SEQ ID NO: 275 - protein, 8 aa, Artificial Sequence
  Synthetic peptide
ISYDGINK

SEQ ID NO: 276 - protein, 8 aa, Artificial Sequence
  Synthetic peptide
ISYDGGNK

SEQ ID NO: 277 - protein, 7 aa, Artificial Sequence
  Synthetic peptide
IGTAGDT

SEQ ID NO: 278 - protein, 8 aa, Artificial Sequence
  Synthetic peptide
VSFDGSNK

SEQ ID NO: 279 - protein, 8 aa, Artificial Sequence
  Synthetic peptide
IGYDGSNQ

SEQ ID NO: 280 - protein, 7 aa, Artificial Sequence
  Synthetic peptide
IGTAGDP

SEQ ID NO: 281 - protein, 8 aa, Artificial Sequence
  Synthetic peptide
ISYDGSNE

SEQ ID NO: 282 - protein, 8 aa, Artificial Sequence
  Synthetic peptide
  MOD_RES (4)..(5): Any amino acid
ISYXXSNK

SEQ ID NO: 283 - protein, 8 aa, Artificial Sequence
  Synthetic peptide
IWYNGSNK

SEQ ID NO: 284 - protein, 8 aa, Artificial Sequence
  Synthetic peptide
ISFDGSNK

SEQ ID NO: 285 - protein, 8 aa, Artificial Sequence
  Synthetic peptide
ISYAGSNQ

SEQ ID NO: 286 - protein, 8 aa, Artificial Sequence
  Synthetic peptide
INTYGNST

SEQ ID NO: 287 - protein, 8 aa, Artificial Sequence
  Synthetic peptide
MYPGDSDL

SEQ ID NO: 288 - protein, 8 aa, Artificial Sequence
  Synthetic peptide
IIPIFGTA

SEQ ID NO: 289 - protein, 8 aa, Artificial Sequence
  Synthetic peptide
ISWDGGST

SEQ ID NO: 290 - protein, 7 aa, Artificial Sequence
  Synthetic peptide
IYWNDDK

SEQ ID NO: 291 - protein, 8 aa, Artificial Sequence
  Synthetic peptide
IRYDGSNK

SEQ ID NO: 292 - protein, 8 aa, Artificial Sequence
  Synthetic peptide
ISAKNTDL

SEQ ID NO: 293 - protein, 8 aa, Artificial Sequence
  Synthetic peptide
  MOD_RES (6)..(6): Any amino acid
ISYDGXNK

SEQ ID NO: 294 - protein, 8 aa, Artificial Sequence
  Synthetic peptide
INPIFGTA

SEQ ID NO: 295 - protein, 8 aa, Artificial Sequence
  Synthetic peptide
IIPIFDTA

SEQ ID NO: 296 - protein, 8 aa, Artificial Sequence
  Synthetic peptide
IDPSDSYT

SEQ ID NO: 297 - protein, 7 aa, Artificial Sequence
  Synthetic peptide
MYYSGST

SEQ ID NO: 298 - protein, 7 aa, Artificial Sequence
  Synthetic peptide
INPSGSS

SEQ ID NO: 299 - protein, 7 aa, Artificial Sequence
  Synthetic peptide
IYYSRST

SEQ ID NO: 300 - protein, 8 aa, Artificial Sequence
  Synthetic peptide
INSDGTST

SEQ ID NO: 301 - protein, 8 aa, Artificial Sequence
  Synthetic peptide
ISYAGSNK

SEQ ID NO: 302 - protein, 8 aa, Artificial Sequence
  Synthetic peptide
INQDGSEK

SEQ ID NO: 303 - protein, 8 aa, Artificial Sequence
  Synthetic peptide
IPNSGDKT

SEQ ID NO: 304 - protein, 37 aa, Artificial Sequence
  Synthetic polypeptide
YYADSVKGRFTISRDNSKNTLYLQMNSLRAEDAVYYC

SEQ ID NO: 305 - protein, 37 aa, Artificial Sequence
  Synthetic polypeptide
NSKSSLQSRVSISVDTSKNQISLKLSSVTAADAVYHC

SEQ ID NO: 306 - protein, 37 aa, Artificial Sequence
  Synthetic polypeptide
NYAQKFQGRVTITADESTSTAYMDLRRLRSEDAVYFC

SEQ ID NO: 307 - protein, 37 aa, Artificial Sequence
  Synthetic polypeptide
AYAASVKGRFTISRDDSKNTAYLQMNSLKTEDAVYYC

SEQ ID NO: 308 - protein, 37 aa, Artificial Sequence
  Synthetic polypeptide
SYADSVKGRFTISRDNAKNTLYLQMNSLRAEDAVYYC

SEQ ID NO: 309 - protein, 37 aa, Artificial Sequence
  Synthetic polypeptide
DYAAPVKGRFTISRDDSKNTLYLQMNSLKTEDAVYYC

SEQ ID NO: 310 - protein, 37 aa, Artificial Sequence
  Synthetic polypeptide
YYADSVKGRFTISRDNSKNTLYLQMNSLRPEDALYYC

SEQ ID NO: 311 - protein, 37 aa, Artificial Sequence
  Synthetic polypeptide
DFNPSLKSRVTMSIDTSKNHFSLRLDSVTAADAVYYC

SEQ ID NO: 312 - protein, 37 aa, Artificial Sequence
  Synthetic polypeptide
NYNPSLKSRVTISVDTSKNQFSLKLSSVTAADAVYYC

SEQ ID NO: 313 - protein, 37 aa, Artificial Sequence
  Synthetic polypeptide
DYAAPVKGRFTISRDDSKNTLYLYMNSLKTEDAVYYC

SEQ ID NO: 314 - protein, 37 aa, Artificial Sequence
  Synthetic polypeptide
NYNPSLTSRVTRSVDTSKNQFSLKLSAVTAPDAVYYC

SEQ ID NO: 315 - protein, 37 aa, Artificial Sequence
  Synthetic polypeptide
YYNPSLKSRATISLDTSKNQFSLKLSSVSAADAVYYC

SEQ ID NO: 316 - protein, 37 aa, Artificial Sequence
  Synthetic polypeptide
RYSPSFQGQVTISADNSISTAYLQWSSLRASDAMYYC

SEQ ID NO: 317 - protein, 37 aa, Artificial Sequence
  Synthetic polypeptide
NYAQKFQGRVTMARDTSISTAYMEVSSLRSDDAVYYC

SEQ ID NO: 318 - protein, 37 aa, Artificial Sequence
  Synthetic polypeptide
NYNPSLKSRITISADTSKNQFSLKLSSVTAADAVYYC

SEQ ID NO: 319 - protein, 37 aa, Artificial Sequence
  Synthetic polypeptide
KYNPSLQSRVTLSVDTSKNQFSLKLRSMTAADAVYYC

SEQ ID NO: 320 - protein, 37 aa, Artificial Sequence
  Synthetic polypeptide
NYNPSLKSRVTISVDTSKNQFSLKLTSVTAADAVYYC

SEQ ID NO: 321 - protein, 37 aa, Artificial Sequence
  Synthetic polypeptide
NYNPSLKSRVTISVDKSKNQFSLKLSSVTAADAVYYC

SEQ ID NO: 322 - protein, 37 aa, Artificial Sequence
  Synthetic polypeptide
KATQQLQDRVTMTTDTSTSTAYLELRNLRPDDAVYYC

SEQ ID NO: 323 - protein, 37 aa, Artificial Sequence
  Synthetic polypeptide
GYAQKFQGRVTMTRNSSISTAYMELSSLRSEDAVYYC

SEQ ID NO: 324 - protein, 37 aa, Artificial Sequence
  Synthetic polypeptide
YYADSVKGRFTISRDNAKNSLYLQMNSLRDEDAVYYC

SEQ ID NO: 325 - protein, 37 aa, Artificial Sequence
  Synthetic polypeptide
TYADSVKGRFTISRDNAKKTLYLQMNSLSVEDAVYYC

SEQ ID NO: 326 - protein, 37 aa, Artificial Sequence
  Synthetic polypeptide
RYSPSFQGQVTISADKSISTAYLQWSSLKASDAMYYC

SEQ ID NO: 327 - protein, 37 aa, Artificial Sequence
  Synthetic polypeptide
NYADSVKGRFTISRDNAKNSLFLQMNSLRPEDALYYC

SEQ ID NO: 328 - protein, 37 aa, Artificial Sequence
  Synthetic polypeptide
RYSPSFQGQVTLSADKSISTAYLQWSSLKASDAIYYC

SEQ ID NO: 329 - protein, 37 aa, Artificial Sequence
  Synthetic polypeptide
SYADSVKGRFTISRDNAKNTLYLQMNSLRVEDAVYYC

SEQ ID NO: 330 - protein, 37 aa, Artificial Sequence
  Synthetic polypeptide
SYADSVKGRFTISRDNAKNSLYLQMNSLRAEDAVYYC

SEQ ID NO: 331 - protein, 37 aa, Artificial Sequence
  Synthetic polypeptide
YYNPSLKSRVTISVDRSKNQFSLKLSSVTAADAVYYC

SEQ ID NO: 332 - protein, 37 aa, Artificial Sequence
  Synthetic polypeptide
YYADSVKGRFTISRDNSKNTLYLQVNSLRPEDAVYYC

SEQ ID NO: 333 - protein, 37 aa, Artificial Sequence
  Synthetic polypeptide
DYAQKFQGRVIMTTDTSTNTGYMELRSLRSDDALYYC

SEQ ID NO: 334 - protein, 37 aa, Artificial Sequence
  Synthetic polypeptide
NYAQKLQGRVTMTTDTSTSTAYMELRSLRSDDAVYYC

SEQ ID NO: 335 - protein, 37 aa, Artificial Sequence
  Synthetic polypeptide
KYAQKFQGRVTITRDDSTSTAYMELSSLRSEDAVYYC

SEQ ID NO: 336 - protein, 37 aa, Artificial Sequence
  Synthetic polypeptide
RYSPSLKSRLTITKDTSKNQVVLTMTNMDPVDATYYC

SEQ ID NO: 337 - protein, 37 aa, Artificial Sequence
  Synthetic polypeptide
HYADSVKGRFTISRDNSKNTLYLQMHSLRAEDAVYYC

SEQ ID NO: 338 - protein, 37 aa, Artificial Sequence
  Synthetic polypeptide
YYADSVKGRFTISRHNSKNTLYLQMNSLRAEDAVYYC

SEQ ID NO: 339 - protein, 37 aa, Artificial Sequence
  Synthetic polypeptide
YYSTSLKTRLTISKDTSKNQVVLTMTNMDPVDATYYC

SEQ ID NO: 340 - protein, 37 aa, Artificial Sequence
  Synthetic polypeptide
YNADSVKGRFTISRDNSKNTLYLQMNSLSAEDAVYYC

SEQ ID NO: 341 - protein, 37 aa, Artificial Sequence
  Synthetic polypeptide
YYADSVKGRFTISRDNAKNSLYLQMNSLRAEDAVYYC

SEQ ID NO: 342 - protein, 37 aa, Artificial Sequence
  Synthetic polypeptide
SYAQKFQGRVTMTRDTSTSTVYMELSSLRSEDAVYYC

SEQ ID NO: 343 - protein, 37 aa, Artificial Sequence
  Synthetic polypeptide
YYVDSVKGRFTISRDNAKNSLYLQMNSLRAEDAVYYC

SEQ ID NO: 344 - protein, 37 aa, Artificial Sequence
  Synthetic polypeptide
YYADSVKGRFTISRDNSKNTLYLDVNSLRAEDAVYYC

SEQ ID NO: 345 - protein, 37 aa, Artificial Sequence
  Synthetic polypeptide
YYNPSLQSRVTISGDTSKNQFSLQLTSVTAADAVYYC

SEQ ID NO: 346 - protein, 37 aa, Artificial Sequence
  Synthetic polypeptide
NYNPSLKTRVTISVDESKNQFSLKLSSVTAADAVYYC

SEQ ID NO: 347 - protein, 37 aa, Artificial Sequence
  Synthetic polypeptide
NYNPSLKSRVTMSVDTSKNQFSLKLSSVTAADAVYYC

SEQ ID NO: 348 - protein, 37 aa, Artificial Sequence
  Synthetic polypeptide
YYVDSVKGRFTISRDNAQNSLYLQMNSLRAEDAVYYC

SEQ ID NO: 349 - protein, 37 aa, Artificial Sequence
  Synthetic polypeptide
RYSPSLKSRLTITKDASKNEVVLTLTNMDPVDGTYYC

SEQ ID NO: 350 - protein, 37 aa, Artificial Sequence
  Synthetic polypeptide
YYTDSVKGRVTVSRDDSKNTLYLQMNSLRTEDAVYFC

SEQ ID NO: 351 - protein, 37 aa, Artificial Sequence
  Synthetic polypeptide
NYAQKFQGRVTMTRDTSISTAYMELSRLRSDDAVYYC

SEQ ID NO: 352 - protein, 37 aa, Artificial Sequence
  Synthetic polypeptide
YYADSAKGRFTISRDNSKNTLYLHMNSLRVEDALYYC

SEQ ID NO: 353 - protein, 37 aa, Artificial Sequence
  Synthetic polypeptide
YYADSVKGRFTISRDNSKNTLYLQMNSLRDEDAVYYC

SEQ ID NO: 354 - protein, 37 aa, Artificial Sequence
  Synthetic polypeptide
YYADSVKGRFTISRDKSKNTLYLQMNSLRAEDAVYYC

SEQ ID NO: 355 - protein, 37 aa, Artificial Sequence
  Synthetic polypeptide
YYNPSLKSRVTISVDTSKNQFSLKLSSVTAADAVYYC

SEQ ID NO: 356 - protein, 37 aa, Artificial Sequence
  Synthetic polypeptide
EYAASVKGRFTISRDDSKSIAYLQMNSLKTEDAVYYC

SEQ ID NO: 357 - protein, 37 aa, Artificial Sequence
  Synthetic polypeptide
NYAQKFQGRVTITADKSTSTAYMELSSLRSEDAVYYC

SEQ ID NO: 358 - protein, 37 aa, Artificial Sequence
  Synthetic polypeptide
HYADSVKGRFTISRDNAKNSLYLQLNSLRTEDAFYYC

SEQ ID NO: 359 - protein, 37 aa, Artificial Sequence
  Synthetic polypeptide
IYTDSVKGRFTISRDNSKNMLYLQMNSLRPADAVYYC

SEQ ID NO: 360 - protein, 37 aa, Artificial Sequence
  Synthetic polypeptide
SYSTSLKSRLTISKDTSKSQVVLTMTNMDPVDATYYC

SEQ ID NO: 361 - protein, 37 aa, Artificial Sequence
  Synthetic polypeptide
GYADSVKGRFTISRDNAKNSLYLQMNSLRAEDALYYC

SEQ ID NO: 362 - protein, 37 aa, Artificial Sequence
  Synthetic polypeptide
YYADSVKGRFTVSRDDSKNTLYLQMNSLRAEDAVYYC

SEQ ID NO: 363 - protein, 37 aa, Artificial Sequence
  Synthetic polypeptide
RYSPSLKSRLTITKDTSKNQVVLTVTNMDPVDATYYC

SEQ ID NO: 364 - protein, 37 aa, Artificial Sequence
  Synthetic polypeptide
IYAQKFQGRVTMTEDTSTDTAYMELSSLRSEDAVYYC

SEQ ID NO: 365 - protein, 37 aa, Artificial Sequence
  Synthetic polypeptide
YYIDSVKGRFTISRDNSRNMLYLQMSSLRAEDAVYYC

SEQ ID NO: 366 - protein, 37 aa, Artificial Sequence
  Synthetic polypeptide
NYNPSLKSRVTMSVDTSKNQFSLSLSSVTAADAVYYC

SEQ ID NO: 367 - protein, 37 aa, Artificial Sequence
  Synthetic polypeptide
NYAQKFQERVTITRDMSTSTAYMELSSLRSEDAVYYC

SEQ ID NO: 368 - protein, 37 aa, Artificial Sequence
  Synthetic polypeptide
YYADSVNGRFTISRDNAKNSLYLQMNSLRAEDAVYYC

SEQ ID NO: 369 - protein, 37 aa, Artificial Sequence
  Synthetic polypeptide
YYAHSVKGRFTISRDNSKNTLYLQMDTLRAEDAVYYC

SEQ ID NO: 370 - protein, 37 aa, Artificial Sequence
  Synthetic polypeptide
YYADSVKGRFTISRDNSKYTLDLQMNSLRAEDAVYYC

SEQ ID NO: 371 - protein, 37 aa, Artificial Sequence
  Synthetic polypeptide
YYADSVKGRFTISRDNSKNTLYLQMNSLRTEDAVYYC

SEQ ID NO: 372 - protein, 37 aa, Artificial Sequence
  Synthetic polypeptide
YYADYVKGRFSISRDNSKNTLYLQMNSLRAEDAVYYC

SEQ ID NO: 373 - protein, 37 aa, Artificial Sequence
  Synthetic polypeptide
YYADSVKGRFTISRDNSKNTLDLQMNSLRPEDALYFC

SEQ ID NO: 374 - protein, 37 aa, Artificial Sequence
  Synthetic polypeptide
YYADSVKGRFTISRDNSKHTLYLQMNSLRAEDAIYYC

SEQ ID NO: 375 - protein, 37 aa, Artificial Sequence
  Synthetic polypeptide
YYADSVKGRITMSRDNSKNTLYLQMNSLRAEDAVYYC

SEQ ID NO: 376 - protein, 37 aa, Artificial Sequence
  Synthetic polypeptide
HYADSVKGRFTISRDNSKNTLYLQMNSLRAEDAVYNC

SEQ ID NO: 377 - protein, 37 aa, Artificial Sequence
  Synthetic polypeptide
YYADSVKGRFIISRDDSKNTLFLQMHSLRAEDAVYYC

SEQ ID NO: 378 - protein, 37 aa, Artificial Sequence
  Synthetic polypeptide
YYPGSVKGRFTISRENAKNSLYLQMNSLRAGDAVYYC

SEQ ID NO: 379 - protein, 37 aa, Artificial Sequence
  Synthetic polypeptide
YYADSVKGRFTISRDNSKNTLYLQMNSLRAEDSVYYC

SEQ ID NO: 380 - protein, 37 aa, Artificial Sequence
  Synthetic polypeptide
YYADSVKGRFTLSRDNSKNTVYLQMNSLRAEDAVYYC

SEQ ID NO: 381 - protein, 37 aa, Artificial Sequence
  Synthetic polypeptide
YYADFVKGRFAMSRDNSKNTLDLQMDSLRAEDAIYYC

SEQ ID NO: 382 - protein, 37 aa, Artificial Sequence
  Synthetic polypeptide
YYADSVKGRFTISRDNSKNTLYLQMNTLRAEDAVYYC

SEQ ID NO: 383 - protein, 37 aa, Artificial Sequence
  Synthetic polypeptide
YYADSVKGRFTISRDNSKNTLYLQMNSLRAEDAVYFC

SEQ ID NO: 384 - protein, 37 aa, Artificial Sequence
  Synthetic polypeptide
YYADSVKGRLTISRDNSKNTLYLQMNSLRAEDAVYYC

SEQ ID NO: 385 - protein, 37 aa, Artificial Sequence
  Synthetic polypeptide
YYADSVKGRFTISRDNSKNTLYVQMNSLRAEDAVYYC

SEQ ID NO: 386 - protein, 37 aa, Artificial Sequence
  Synthetic polypeptide
YYADSVQGRFTISRDNSKNTLYLQMNSLRAEDAVYYC

SEQ ID NO: 387 - protein, 37 aa, Artificial Sequence
  Synthetic polypeptide
IYAQKFQGRVTMTEDTSTDTAYVELSSLRSEDAVYYC

SEQ ID NO: 388 - protein, 37 aa, Artificial Sequence
  Synthetic polypeptide
  MOD_RES (12)..(12): Any amino acid
YYADSVKGRFTXSRDNSKNTLYLQMNSLRAEDAVYYC

SEQ ID NO: 389 - protein, 37 aa, Artificial Sequence
  Synthetic polypeptide
YYADSVKGRFTISRDNSKNTLYLQTNSLRAEDAVYSC

SEQ ID NO: 390 - protein, 37 aa, Artificial Sequence
  Synthetic polypeptide
YYADSVKGRFTISRDNSKNTVYLQMNSLRPEDAVYYC

SEQ ID NO: 391 - protein, 37 aa, Artificial Sequence
  Synthetic polypeptide
YYAASVKGRFTISRDNSKNTLYLQMNSLRAEDAVYYC

SEQ ID NO: 392 - protein, 37 aa, Artificial Sequence
  Synthetic polypeptide
YYADSVKGRFTISRDNSKNTLYLQMNSLRAEDAMYYC

SEQ ID NO: 393 - protein, 37 aa, Artificial Sequence
  Synthetic polypeptide
NYADSVRGRFTVSRDNAKNTLYLQMNSLRAEDAVYYC

SEQ ID NO: 394 - protein, 37 aa, Artificial Sequence
  Synthetic polypeptide
NYNPSLKSRVTISVDTPKNQFSLKVRSVTAADAVYYC

SEQ ID NO: 395 - protein, 37 aa, Artificial Sequence
  Synthetic polypeptide
RYSPSFRGQVIISVDKSISTAYLQWRSLKASDAMYYC

SEQ ID NO: 396 - protein, 37 aa, Artificial Sequence
  Synthetic polypeptide
NYAQKFQGRVTITADESTSTAYMELSSLRSEDAVYYC

SEQ ID NO: 397 - protein, 37 aa, Artificial Sequence
  Synthetic polypeptide
YYADSVKGRFTISRDNSKNSLYLQMNSLRTEDALYYC

SEQ ID NO: 398 - protein, 37 aa, Artificial Sequence
  Synthetic polypeptide
YYADSVKGRFTISRDYAENSVYLQMDSLRADDAVYFC

SEQ ID NO: 399 - protein, 37 aa, Artificial Sequence
  Synthetic polypeptide
HYAQKFQGRVTITTDEATSTAYMELSSLRSEDAVYYC

SEQ ID NO: 400 - protein, 37 aa, Artificial Sequence
  Synthetic polypeptide
NYNPSLKSRVTISVDTSKNQFSLKLRSVTAADAVYYC

SEQ ID NO: 401 - protein, 37 aa, Artificial Sequence
  Synthetic polypeptide
NYSPSFQGHVTISADKSISTAYLQWSSLKASDAMYYC

SEQ ID NO: 402 - protein, 37 aa, Artificial Sequence
  Synthetic polypeptide
NYNASLKSRVTISADTSKNQFSLKLSSVTAADAVYYC

SEQ ID NO: 403 - protein, 37 aa, Artificial Sequence
  Synthetic polypeptide
YYVDFVKGRFTISRDNAKNSLYLQMNSLRAEDAVYYC

SEQ ID NO: 404 - protein, 37 aa, Artificial Sequence
  Synthetic polypeptide
NYAQKFQGRVTITADESTSTAYMELSSLRSADAVYFC

SEQ ID NO: 405 - protein, 37 aa, Artificial Sequence
  Synthetic polypeptide
NYNPSLKSRVTISVDTSKNQFSLKVSSVTAADAVYYC

SEQ ID NO: 406 - protein, 37 aa, Artificial Sequence
  Synthetic polypeptide
NYHPSLKSRVTMSVDTSKNQFSLKLSSVTAADALYYC

SEQ ID NO: 407 - protein, 37 aa, Artificial Sequence
  Synthetic polypeptide
NYNPSLKSRVTISVDTSKNQFSLKLNSVTAADAVYYC

SEQ ID NO: 408 - protein, 37 aa, Artificial Sequence
  Synthetic polypeptide
NYNPSLKSRVTISVDTSKNQFSLKMSSVTAADAVYYC

SEQ ID NO: 409 - protein, 37 aa, Artificial Sequence
  Synthetic polypeptide
YYADSVKGRFTISRDNSRNTLYLQMNSLRAEDALYYC

SEQ ID NO: 410 - protein, 37 aa, Artificial Sequence
  Synthetic polypeptide
NYNPSLKSRVTISVDTSKNQFSLKLSSVTVADAVYYC

SEQ ID NO: 411 - protein, 37 aa, Artificial Sequence
  Synthetic polypeptide
YYVDSVKGRFTISRDNAKDSLYLEMNSLSAEDAVYYC

SEQ ID NO: 412 - protein, 37 aa, Artificial Sequence
  Synthetic polypeptide
YYADSVEGRFTISRDNSKNTLYLQMNSLRVEDAVYYC

SEQ ID NO: 413 - protein, 37 aa, Artificial Sequence
  Synthetic polypeptide
SYADSVKGRFTISRDNAKNTLYLQMNSLGAEDAVYYC

SEQ ID NO: 414 - protein, 37 aa, Artificial Sequence
  Synthetic polypeptide
YYADSVKRRFTISRDNSKNTLYLQMNSLRAEDAVYYC

SEQ ID NO: 415 - protein, 37 aa, Artificial Sequence
  Synthetic polypeptide
NYAQKPQGRVTMTKDTSTSTAYMELRSLRSDDAVYYC

SEQ ID NO: 416 - protein, 10 aa, Artificial Sequence
  Synthetic peptide
ARDGGGYMDV

SEQ ID NO: 417 - protein, 11 aa, Artificial Sequence
  Synthetic peptide
ARDRSSWYLDY

SEQ ID NO: 418 - protein, 14 aa, Artificial Sequence
  Synthetic peptide
ARGVAVAGTWWFDP

SEQ ID NO: 419 - protein, 17 aa, Artificial Sequence
  Synthetic peptide
AKDRGIAVAGTLYYFDY

SEQ ID NO: 420 - protein, 18 aa, Artificial Sequence
  Synthetic peptide
ARSRDIVVEPTDRDPCDI

SEQ ID NO: 421 - protein, 5 aa, Artificial Sequence
  Synthetic peptide
TRLDV

SEQ ID NO: 422 - protein, 5 aa, Artificial Sequence
  Synthetic peptide
ARPPY

SEQ ID NO: 423 - protein, 5 aa, Artificial Sequence
  Synthetic peptide
TRHDV

SEQ ID NO: 424 - protein, 5 aa, Artificial Sequence
  Synthetic peptide
TRLDI

SEQ ID NO: 425 - protein, 6 aa, Artificial Sequence
  Synthetic peptide
TTRGGY

SEQ ID NO: 426 - protein, 6 aa, Artificial Sequence
  Synthetic peptide
ARVFDY

SEQ ID NO: 427 - protein, 6 aa, Artificial Sequence
  Synthetic peptide
ARGFDH

SEQ ID NO: 428 - protein, 6 aa, Artificial Sequence
  Synthetic peptide
ARGFTD

SEQ ID NO: 429 - protein, 6 aa, Artificial Sequence
  Synthetic peptide
TTGGRL

SEQ ID NO: 430 - protein, 6 aa, Artificial Sequence
  Synthetic peptide
AGGCDY

SEQ ID NO: 431 - protein, 6 aa, Artificial Sequence
  Synthetic peptide
ARLVDY

SEQ ID NO: 432 - protein, 6 aa, Artificial Sequence
  Synthetic peptide
ARGIDY

SEQ ID NO: 433 - protein, 6 aa, Artificial Sequence
  Synthetic peptide
ASQFDY

SEQ ID NO: 434 - protein, 6 aa, Artificial Sequence
  Synthetic peptide
TAGGRV

SEQ ID NO: 435 - protein, 6 aa, Artificial Sequence
  Synthetic peptide
ARDADY

SEQ ID NO: 436 - protein, 6 aa, Artificial Sequence
  Synthetic peptide
ARGFDP

SEQ ID NO: 437 - protein, 7 aa, Artificial Sequence
  Synthetic peptide
TRGVPGY

SEQ ID NO: 438 - protein, 7 aa, Artificial Sequence
  Synthetic peptide
ARGFGDY

SEQ ID NO: 439 - protein, 7 aa, Artificial Sequence
  Synthetic peptide
ARDLGLD

SEQ ID NO: 440 - protein, 8 aa, Artificial Sequence
  Synthetic peptide
ARGWYFDY

SEQ ID NO: 441 - protein, 8 aa, Artificial Sequence
  Synthetic peptide
ARGSAIDY

SEQ ID NO: 442 - protein, 8 aa, Artificial Sequence
  Synthetic peptide
ARGVYFDP

SEQ ID NO: 443 - protein, 8 aa, Artificial Sequence
  Synthetic peptide
TRHGDFVD

SEQ ID NO: 444 - protein, 8 aa, Artificial Sequence
  Synthetic peptide
ARGWWFDP

SEQ ID NO: 445 - protein, 8 aa, Artificial Sequence
  Synthetic peptide
ARGVEADY

SEQ ID NO: 446 - protein, 8 aa, Artificial Sequence
  Synthetic peptide
ASIVWPDY

SEQ ID NO: 447 - protein, 8 aa, Artificial Sequence
  Synthetic peptide
ARDVRDVY

SEQ ID NO: 448 - protein, 8 aa, Artificial Sequence
  Synthetic peptide
AATNWFDP

SEQ ID NO: 449 - protein, 9 aa, Artificial Sequence
  Synthetic peptide
ARLEMLPDY

SEQ ID NO: 450 - protein, 9 aa, Artificial Sequence
  Synthetic peptide
AKGAHGMDV

SEQ ID NO: 451 - protein, 9 aa, Artificial Sequence
  Synthetic peptide
AKFGGVFDY

SEQ ID NO: 452 - protein, 9 aa, Artificial Sequence
  Synthetic peptide
ARSFSAFDI

SEQ ID NO: 453 - protein, 9 aa, Artificial Sequence
  Synthetic peptide
RGELLGVDY

SEQ ID NO: 454 - protein, 9 aa, Artificial Sequence
  Synthetic peptide
ASLSAPSDY

SEQ ID NO: 455 - protein, 9 aa, Artificial Sequence
  Synthetic peptide
ARTARVLES

SEQ ID NO: 456 - protein, 9 aa, Artificial Sequence
  Synthetic peptide
ARDLEYFDY

SEQ ID NO: 457 - protein, 9 aa, Artificial Sequence
  Synthetic peptide
ATYGGAFDI

SEQ ID NO: 458 - protein, 10 aa, Artificial Sequence
  Synthetic peptide
ARGREWELGY

SEQ ID NO: 459 - protein, 10 aa, Artificial Sequence
  Synthetic peptide
ARDGGGILGY

SEQ ID NO: 460 - protein, 10 aa, Artificial Sequence
  Synthetic peptide
AGELLFAFDY

SEQ ID NO: 461 - protein, 10 aa, Artificial Sequence
  Synthetic peptide
ARDSGGLIDY

SEQ ID NO: 462 - protein, 10 aa, Artificial Sequence
  Synthetic peptide
ARDLGSMFDP

SEQ ID NO: 463 - protein, 10 aa, Artificial Sequence
  Synthetic peptide
ARALDWYFDL

SEQ ID NO: 464 - protein, 10 aa, Artificial Sequence
  Synthetic peptide
ASGLLLEFDY

SEQ ID NO: 465 - protein, 10 aa, Artificial Sequence
  Synthetic peptide
AREVMVYLDY

SEQ ID NO: 466 - protein, 10 aa, Artificial Sequence
  Synthetic peptide
ARDWGSGMDV

SEQ ID NO: 467 - protein, 10 aa, Artificial Sequence
  Synthetic peptide
ARDSGSAFDI

SEQ ID NO: 468 - protein, 10 aa, Artificial Sequence
  Synthetic peptide
ARDLGGYFDY

SEQ ID NO: 469 - protein, 10 aa, Artificial Sequence
  Synthetic peptide
AREEIVVLDY

SEQ ID NO: 470 - protein, 10 aa, Artificial Sequence
  Synthetic peptide
AGELVAGLDY

SEQ ID NO: 471 - protein, 10 aa, Artificial Sequence
  Synthetic peptide
ARAFYDSSGY

SEQ ID NO: 472 - protein, 10 aa, Artificial Sequence
  Synthetic peptide
ASQLVDAFDI

SEQ ID NO: 473 - protein, 10 aa, Artificial Sequence
  Synthetic peptide
AGELLSWFDP

SEQ ID NO: 474 - protein, 10 aa, Artificial Sequence
  Synthetic peptide
ARGATYYYDY

SEQ ID NO: 475 - protein, 10 aa, Artificial Sequence
  Synthetic peptide
ARPPGHYFDY

SEQ ID NO: 476 - protein, 10 aa, Artificial Sequence
  Synthetic peptide
ARGSGWYIDY

SEQ ID NO: 477 - protein, 10 aa, Artificial Sequence
  Synthetic peptide
ASSLLLAFDY

SEQ ID NO: 478 - protein, 10 aa, Artificial Sequence
  Synthetic peptide
ARGMGSGMDV

SEQ ID NO: 479 - protein, 10 aa, Artificial Sequence
  Synthetic peptide
ANDLYYGMDV

SEQ ID NO: 480 - protein, 10 aa, Artificial Sequence
  Synthetic peptide
AREVFGYFDY

SEQ ID NO: 481 - protein, 10 aa, Artificial Sequence
  Synthetic peptide
ARDLGGYFDL

SEQ ID NO: 482 - protein, 10 aa, Artificial Sequence
  Synthetic peptide
AKTSGVSLDY

SEQ ID NO: 483 - protein, 10 aa, Artificial Sequence
  Synthetic peptide
AREGPDAFDI

SEQ ID NO: 484 - protein, 10 aa, Artificial Sequence
  Synthetic peptide
ARAPGPYFDY

SEQ ID NO: 485 - protein, 10 aa, Artificial Sequence
  Synthetic peptide
ARVRQRGLDY

SEQ ID NO: 486 - protein, 10 aa, Artificial Sequence
  Synthetic peptide
ASELRDNFDY

SEQ ID NO: 487 - protein, 10 aa, Artificial Sequence
  Synthetic peptide
ARDLGSGWYP

SEQ ID NO: 488 - protein, 10 aa, Artificial Sequence
  Synthetic peptide
ARGPGESIDY

SEQ ID NO: 489 - protein, 10 aa, Artificial Sequence
  Synthetic peptide
ARGLNGDFDY

SEQ ID NO: 490 - protein, 10 aa, Artificial Sequence
  Synthetic peptide
ARDGKLNFDY

SEQ ID NO: 491 - protein, 10 aa, Artificial Sequence
  Synthetic peptide
AREVGAGGDY

SEQ ID NO: 492 - protein, 10 aa, Artificial Sequence
  Synthetic peptide
ASELLWFGEC

SEQ ID NO: 493 - protein, 10 aa, Artificial Sequence
  Synthetic peptide
AGELLGAFDI

SEQ ID NO: 494 - protein, 10 aa, Artificial Sequence
  Synthetic peptide
VGALLESFDY

SEQ ID NO: 495 - protein, 10 aa, Artificial Sequence
  Synthetic peptide
ARDLGGSGWY

SEQ ID NO: 496 - protein, 10 aa, Artificial Sequence
  Synthetic peptide
AKELLRGLDY

SEQ ID NO: 497 - protein, 10 aa, Artificial Sequence
  Synthetic peptide
AKEGIVAFDY

SEQ ID NO: 498 - protein, 10 aa, Artificial Sequence
  Synthetic peptide
ALELVLALDY

SEQ ID NO: 499 - protein, 10 aa, Artificial Sequence
  Synthetic peptide
ARDSGAMLDY

SEQ ID NO: 500 - protein, 11 aa, Artificial Sequence
  Synthetic peptide
ARELSYYGMDV

SEQ ID NO: 501 - protein, 11 aa, Artificial Sequence
  Synthetic peptide
ARTLVYYYMDV

SEQ ID NO: 502 - protein, 11 aa, Artificial Sequence
  Synthetic peptide
ARDRSGWYLDY

SEQ ID NO: 503 - protein, 11 aa, Artificial Sequence
  Synthetic peptide
AREGPLDAFDI

SEQ ID NO: 504 - protein, 11 aa, Artificial Sequence
  Synthetic peptide
AHHIVATIWDY

SEQ ID NO: 505 - protein, 11 aa, Artificial Sequence
  Synthetic peptide
ARDLSGYGFDY

SEQ ID NO: 506 - protein, 11 aa, Artificial Sequence
  Synthetic peptide
ARDYGDLWFDP

SEQ ID NO: 507 - protein, 11 aa, Artificial Sequence
  Synthetic peptide
ARALVYYGMDV

SEQ ID NO: 508 - protein, 11 aa, Artificial Sequence
  Synthetic peptide
ARTYGGPPFDY

SEQ ID NO: 509 - protein, 11 aa, Artificial Sequence
  Synthetic peptide
AHYTAMVLFDY

SEQ ID NO: 510 - protein, 11 aa, Artificial Sequence
  Synthetic peptide
ARVLSHYGMDV

SEQ ID NO: 511 - protein, 11 aa, Artificial Sequence
  Synthetic peptide
VREGSGSYGDY

SEQ ID NO: 512 - protein, 11 aa, Artificial Sequence
  Synthetic peptide
ARYAAGYYFDY

SEQ ID NO: 513 - protein, 11 aa, Artificial Sequence
  Synthetic peptide
VGELPYYGMDV

SEQ ID NO: 514 - protein, 11 aa, Artificial Sequence
  Synthetic peptide
ARDDSSGYYGY

SEQ ID NO: 515 - protein, 11 aa, Artificial Sequence
  Synthetic peptide
ARDQSVYGMDV

SEQ ID NO: 516 - protein, 11 aa, Artificial Sequence
  Synthetic peptide
ARMTTVTTLDY

SEQ ID NO: 517 - protein, 11 aa, Artificial Sequence
  Synthetic peptide
AREGGDYSFDY

SEQ ID NO: 518 - protein, 11 aa, Artificial Sequence
  Synthetic peptide
ARAVDHGWFDP

SEQ ID NO: 519 - protein, 11 aa, Artificial Sequence
  Synthetic peptide
ARGDGYNYFDY

SEQ ID NO: 520 - protein, 11 aa, Artificial Sequence
  Synthetic peptide
ARDLGDYGMDV

SEQ ID NO: 521 - protein, 11 aa, Artificial Sequence
  Synthetic peptide
ARDLPFYGMDV

SEQ ID NO: 522 - protein, 11 aa, Artificial Sequence
  Synthetic peptide
ARDKGDDAFDI

SEQ ID NO: 523 - protein, 11 aa, Artificial Sequence
  Synthetic peptide
ARDRTGDGMDV

SEQ ID NO: 524 - protein, 11 aa, Artificial Sequence
  Synthetic peptide
AKEGGNLGFDY

SEQ ID NO: 525 - protein, 11 aa, Artificial Sequence
  Synthetic peptide
ARDGYTQYFDY

SEQ ID NO: 526 - protein, 11 aa, Artificial Sequence
  Synthetic peptide
AGGSYYDAFDI

SEQ ID NO: 527 - protein, 11 aa, Artificial Sequence
  Synthetic peptide
ARDLKSYGMDV

SEQ ID NO: 528 - protein, 11 aa, Artificial Sequence
  Synthetic peptide
AREVYGVGFDY

SEQ ID NO: 529 - protein, 11 aa, Artificial Sequence
  Synthetic peptide
AGDSGWYVFDY

SEQ ID NO: 530 - protein, 11 aa, Artificial Sequence
  Synthetic peptide
ARDRAINWFDP

SEQ ID NO: 531 - protein, 11 aa, Artificial Sequence
  Synthetic peptide
ARMAVNTGLDY

SEQ ID NO: 532 - protein, 11 aa, Artificial Sequence
  Synthetic peptide
AHRVTISGFDP

SEQ ID NO: 533 - protein, 11 aa, Artificial Sequence
  Synthetic peptide
AHRMGRGAFDP

SEQ ID NO: 534 - protein, 11 aa, Artificial Sequence
  Synthetic peptide
AGGSFYYGMDV

SEQ ID NO: 535 - protein, 12 aa, Artificial Sequence
  Synthetic peptide
ARHAHYYYGMDV

SEQ ID NO: 536 - protein, 12 aa, Artificial Sequence
  Synthetic peptide
ARARDGYRNFDY

SEQ ID NO: 537 - protein, 12 aa, Artificial Sequence
  Synthetic peptide
ARARDGYNHFDY

SEQ ID NO: 538 - protein, 12 aa, Artificial Sequence
  Synthetic peptide
AGGLLWFGELWY

SEQ ID NO: 539 - protein, 12 aa, Artificial Sequence
  Synthetic peptide
AREDPMIDAFDI

SEQ ID NO: 540 - protein, 12 aa, Artificial Sequence
  Synthetic peptide
ARDSSGWYYFDC

SEQ ID NO: 541 - protein, 12 aa, Artificial Sequence
  Synthetic peptide
ASSGSAYYGMDV

SEQ ID NO: 542 - protein, 12 aa, Artificial Sequence
  Synthetic peptide
ARSLWFGELSGY

SEQ ID NO: 543 - protein, 12 aa, Artificial Sequence
  Synthetic peptide
ARRLAAAGTFDY

SEQ ID NO: 544 - protein, 12 aa, Artificial Sequence
  Synthetic peptide
ARDVYSSGWLDY

SEQ ID NO: 545 - protein, 12 aa, Artificial Sequence
  Synthetic peptide
ARGDNYVSPFDY

SEQ ID NO: 546 - protein, 12 aa, Artificial Sequence
  Synthetic peptide
AHRRLFYGYYDY

SEQ ID NO: 547 - protein, 12 aa, Artificial Sequence
  Synthetic peptide
AREDDYGDYLDY

SEQ ID NO: 548 - protein, 12 aa, Artificial Sequence
  Synthetic peptide
ARADGYNAPFDY

SEQ ID NO: 549 - protein, 12 aa, Artificial Sequence
  Synthetic peptide
AREEVTTDAFDI

SEQ ID NO: 550 - protein, 12 aa, Artificial Sequence
  Synthetic peptide
AHRLPIYDAFDI

SEQ ID NO: 551 - protein, 12 aa, Artificial Sequence
  Synthetic peptide
ARDGASGWYFDY

SEQ ID NO: 552 - protein, 12 aa, Artificial Sequence
  Synthetic peptide
AKDLGGYSYFDY

SEQ ID NO: 553 - protein, 12 aa, Artificial Sequence
  Synthetic peptide
AKERQWLAYFDY

SEQ ID NO: 554 - protein, 12 aa, Artificial Sequence
  Synthetic peptide
ARDGQLLYAFDI

SEQ ID NO: 555 - protein, 12 aa, Artificial Sequence
  Synthetic peptide
ARDLRFGEYDDY

SEQ ID NO: 556 - protein, 12 aa, Artificial Sequence
  Synthetic peptide
AREVVVIDAFDI

SEQ ID NO: 557 - protein, 12 aa, Artificial Sequence
  Synthetic peptide
ARELAAAVPFDY

SEQ ID NO: 558 - protein, 12 aa, Artificial Sequence
  Synthetic peptide
ARESGSGSYPDY

SEQ ID NO: 559 - protein, 12 aa, Artificial Sequence
  Synthetic peptide
AKDYSDYGGMDV

SEQ ID NO: 560 - protein, 12 aa, Artificial Sequence
  Synthetic peptide
ARLEWLRGGFDY

SEQ ID NO: 561 - protein, 12 aa, Artificial Sequence
  Synthetic peptide
AKFGIAAAGFDY

SEQ ID NO: 562 - protein, 12 aa, Artificial Sequence
  Synthetic peptide
ASGLLDYYGMDV

SEQ ID NO: 563 - protein, 12 aa, Artificial Sequence
  Synthetic peptide
AREDYGDYGFDY

SEQ ID NO: 564 - protein, 12 aa, Artificial Sequence
  Synthetic peptide
ARDRGGYLYFDY

SEQ ID NO: 565 - protein, 12 aa, Artificial Sequence
  Synthetic peptide
ARDLAVGATDDY

SEQ ID NO: 566 - protein, 12 aa, Artificial Sequence
  Synthetic peptide
ARWLGGYYGMDV

SEQ ID NO: 567 - protein, 12 aa, Artificial Sequence
  Synthetic peptide
AHRIGWNYYFDY

SEQ ID NO: 568 - protein, 12 aa, Artificial Sequence
  Synthetic peptide
ARSSSGYYPFDY

SEQ ID NO: 569 - protein, 12 aa, Artificial Sequence
  Synthetic peptide
AGTASYYYGMDV

SEQ ID NO: 570 - protein, 12 aa, Artificial Sequence
  Synthetic peptide
ARARWLRGEFDY

SEQ ID NO: 571 - protein, 12 aa, Artificial Sequence
  Synthetic peptide
ARGKGSYYYMDV

SEQ ID NO: 572 - protein, 12 aa, Artificial Sequence
  Synthetic peptide
ASSLLPLYGMDV

SEQ ID NO: 573 - protein, 12 aa, Artificial Sequence
  Synthetic peptide
AKGYSGYYYFDY

SEQ ID NO: 574 - protein, 12 aa, Artificial Sequence
  Synthetic peptide
TRDNFWSGYSGY

SEQ ID NO: 575 - protein, 12 aa, Artificial Sequence
  Synthetic peptide
ARAASSYYGMDV

SEQ ID NO: 576 - protein, 12 aa, Artificial Sequence
  Synthetic peptide
ARVLIPHYGMDV

SEQ ID NO: 577 - protein, 12 aa, Artificial Sequence
  Synthetic peptide
ARDGKWLRTLDY

SEQ ID NO: 578 - protein, 12 aa, Artificial Sequence
  Synthetic peptide
AKVDGSGSSFDY

SEQ ID NO: 579 - protein, 12 aa, Artificial Sequence
  Synthetic peptide
ASLPSSGWYFHY

SEQ ID NO: 580 - protein, 12 aa, Artificial Sequence
  Synthetic peptide
AEGYSSSWYLDY

SEQ ID NO: 581 - protein, 12 aa, Artificial Sequence
  Synthetic peptide
AREGGYLDAFDI

SEQ ID NO: 582 - protein, 12 aa, Artificial Sequence
  Synthetic peptide
ARGGWSLWYFDY

SEQ ID NO: 583 - protein, 12 aa, Artificial Sequence
  Synthetic peptide
AREYSGYVGFDY

SEQ ID NO: 584 - protein, 12 aa, Artificial Sequence
  Synthetic peptide
AKDAGLGYYFDY

SEQ ID NO: 585 - protein, 12 aa, Artificial Sequence
  Synthetic peptide
ARDREGGYGMDV

SEQ ID NO: 586 - protein, 12 aa, Artificial Sequence
  Synthetic peptide
ANSLLWFGELWN

SEQ ID NO: 587 - protein, 12 aa, Artificial Sequence
  Synthetic peptide
ARDLAVGDAFDI

SEQ ID NO: 588 - protein, 12 aa, Artificial Sequence
  Synthetic peptide
ARDLRVGDDFDY

SEQ ID NO: 589 - protein, 12 aa, Artificial Sequence
  Synthetic peptide
AQGVWFGELTDY

SEQ ID NO: 590 - protein, 12 aa, Artificial Sequence
  Synthetic peptide
ARDLLAAYGMDV

SEQ ID NO: 591 - protein, 12 aa, Artificial Sequence
  Synthetic peptide
AKDRDGYSYFHY

SEQ ID NO: 592 - protein, 12 aa, Artificial Sequence
  Synthetic peptide
ASELSNYYGMDV

SEQ ID NO: 593 - protein, 12 aa, Artificial Sequence
  Synthetic peptide
ATQITMVDAFDI

SEQ ID NO: 594 - protein, 12 aa, Artificial Sequence
  Synthetic peptide
AKEDGYNDYFDY

SEQ ID NO: 595 - protein, 12 aa, Artificial Sequence
  Synthetic peptide
AKDGGLRRAFDY

SEQ ID NO: 596 - protein, 12 aa, Artificial Sequence
  Synthetic peptide
ARDCIPSYYFDY

SEQ ID NO: 597 - protein, 12 aa, Artificial Sequence
  Synthetic peptide
AGTLTPYYGMDV

SEQ ID NO: 598 - protein, 12 aa, Artificial Sequence
  Synthetic peptide
ARDFGVSDAFDI

SEQ ID NO: 599 - protein, 12 aa, Artificial Sequence
  Synthetic peptide
ARGGGDGDAFDI

SEQ ID NO: 600 - protein, 12 aa, Artificial Sequence
  Synthetic peptide
ARMPVVVNAFDI

SEQ ID NO: 601 - protein, 12 aa, Artificial Sequence
  Synthetic peptide
AKVRGSYYIFDY

SEQ ID NO: 602 - protein, 12 aa, Artificial Sequence
  Synthetic peptide
ARGGGYYDPFDY

SEQ ID NO: 603 - protein, 12 aa, Artificial Sequence
  Synthetic peptide
AISLLWFGELLY

SEQ ID NO: 604 - protein, 12 aa, Artificial Sequence
  Synthetic peptide
ARDLLWLRAFDY

SEQ ID NO: 605 - protein, 12 aa, Artificial Sequence
  Synthetic peptide
AREISGSYAFDY

SEQ ID NO: 606 - protein, 12 aa, Artificial Sequence
  Synthetic peptide
AREDVLSDAFDI

SEQ ID NO: 607 - protein, 12 aa, Artificial Sequence
  Synthetic peptide
ARQLWLRSHFDY

SEQ ID NO: 608 - protein, 12 aa, Artificial Sequence
  Synthetic peptide
ARIRWGYWYFDL

SEQ ID NO: 609 - protein, 12 aa, Artificial Sequence
  Synthetic peptide
AKERGYSYGLDY

SEQ ID NO: 610 - protein, 12 aa, Artificial Sequence
  Synthetic peptide
AGELLSRYGMDV

SEQ ID NO: 611 - protein, 12 aa, Artificial Sequence
  Synthetic peptide
ARQEHYYYGMDV

SEQ ID NO: 612 - protein, 12 aa, Artificial Sequence
  Synthetic peptide
ARTSGYSSYFDY

SEQ ID NO: 613 - protein, 12 aa, Artificial Sequence
  Synthetic peptide
AKDPQGDLCFDY

SEQ ID NO: 614 - protein, 12 aa, Artificial Sequence
  Synthetic peptide
AREGFWSGYFDY

SEQ ID NO: 615 - protein, 12 aa, Artificial Sequence
  Synthetic peptide
ASTLHYYYGMDV

SEQ ID NO: 616 - protein, 12 aa, Artificial Sequence
  Synthetic peptide
ARDGGYRYGMDV

SEQ ID NO: 617 - protein, 12 aa, Artificial Sequence
  Synthetic peptide
ARGGASGWYFVY

SEQ ID NO: 618 - protein, 12 aa, Artificial Sequence
  Synthetic peptide
ARTISYYYGMDV

SEQ ID NO: 619 - protein, 12 aa, Artificial Sequence
  Synthetic peptide
ARMMAAMVIFDY

SEQ ID NO: 620 - protein, 12 aa, Artificial Sequence
  Synthetic peptide
ARAASVYYGMDV

SEQ ID NO: 621 - protein, 12 aa, Artificial Sequence
  Synthetic peptide
ARGLRYFDWLAY

SEQ ID NO: 622 - protein, 12 aa, Artificial Sequence
  Synthetic peptide
ARDFGFGEPRDY

SEQ ID NO: 623 - protein, 12 aa, Artificial Sequence
  Synthetic peptide
SVYGYYYYGLDV

SEQ ID NO: 624 - protein, 12 aa, Artificial Sequence
  Synthetic peptide
ASQVSIFYGMDV

SEQ ID NO: 625 - protein, 12 aa, Artificial Sequence
  Synthetic peptide
ADSLLDYYGMDV

SEQ ID NO: 626 - protein, 12 aa, Artificial Sequence
  Synthetic peptide
ARDRGILYAFDI

SEQ ID NO: 627 - protein, 12 aa, Artificial Sequence
  Synthetic peptide
ARTSGSYYYFDY

SEQ ID NO: 628 - protein, 12 aa, Artificial Sequence
  Synthetic peptide
ARLLPAASLFDY

SEQ ID NO: 629 - protein, 12 aa, Artificial Sequence
  Synthetic peptide
ARILVGATKTDY

SEQ ID NO: 630 - protein, 12 aa, Artificial Sequence
  Synthetic peptide
ARASGSYFTLDY

SEQ ID NO: 631 - protein, 12 aa, Artificial Sequence
  Synthetic peptide
ARDLRLGEEFDY

SEQ ID NO: 632 - protein, 12 aa, Artificial Sequence
  Synthetic peptide
ARDGGIAYACDY

SEQ ID NO: 633 - protein, 12 aa, Artificial Sequence
  Synthetic peptide
SGELLAYYGMDV

SEQ ID NO: 634 - protein, 12 aa, Artificial Sequence
  Synthetic peptide
ARDLSGWYGLDY

SEQ ID NO: 635 - protein, 13 aa, Artificial Sequence
  Synthetic peptide
ARDEHSSGWYFDY

SEQ ID NO: 636 - protein, 13 aa, Artificial Sequence
  Synthetic peptide
ARDGIVGATGLGY

SEQ ID NO: 637 - protein, 13 aa, Artificial Sequence
  Synthetic peptide
ARGPIAAAGLFDY

SEQ ID NO: 638 - protein, 13 aa, Artificial Sequence
  Synthetic peptide
AHLYYYYYYGMDV

SEQ ID NO: 639 - protein, 13 aa, Artificial Sequence
  Synthetic peptide
ATGSGSYLGWFDP

SEQ ID NO: 640 - protein, 13 aa, Artificial Sequence
  Synthetic peptide
ARDLIGGYYYMDV

SEQ ID NO: 641 - protein, 13 aa, Artificial Sequence
  Synthetic peptide
ARVPLVYYYYMDV

SEQ ID NO: 642 - protein, 13 aa, Artificial Sequence
  Synthetic peptide
ARGYSGSYSYFDY

SEQ ID NO: 643 - protein, 13 aa, Artificial Sequence
  Synthetic peptide
ASQLAPYYYGMDV

SEQ ID NO: 644 - protein, 13 aa, Artificial Sequence
  Synthetic peptide
ARDLRRYYYGMDV

SEQ ID NO: 645 - protein, 13 aa, Artificial Sequence
  Synthetic peptide
ARGGIAVAGFFDY

SEQ ID NO: 646 - protein, 13 aa, Artificial Sequence
  Synthetic peptide
ARVHSSSWYYFDY

SEQ ID NO: 647 - protein, 13 aa, Artificial Sequence
  Synthetic peptide
AKDYYGSGSYFDY

SEQ ID NO: 648 - protein, 13 aa, Artificial Sequence
  Synthetic peptide
ARGSGSYYGPFDY

SEQ ID NO: 649 - protein, 13 aa, Artificial Sequence
  Synthetic peptide
AHAGLYYYYGMDV

SEQ ID NO: 650 - protein, 13 aa, Artificial Sequence
  Synthetic peptide
ARDLAVAGTGEDY

SEQ ID NO: 651 - protein, 13 aa, Artificial Sequence
  Synthetic peptide
ARHDYYYYYYMDV

SEQ ID NO: 652 - protein, 13 aa, Artificial Sequence
  Synthetic peptide
ARDNSGYSFQFDY

SEQ ID NO: 653 - protein, 13 aa, Artificial Sequence
  Synthetic peptide
AREQIAVGDAFDI

SEQ ID NO: 654 - protein, 13 aa, Artificial Sequence
  Synthetic peptide
ARQLVLLYYGMDV

SEQ ID NO: 655 - protein, 13 aa, Artificial Sequence
  Synthetic peptide
AADSSGYYDAFDI

SEQ ID NO: 656 - protein, 13 aa, Artificial Sequence
  Synthetic peptide
ARDPVAVAGPLDY

SEQ ID NO: 657 - protein, 13 aa, Artificial Sequence
  Synthetic peptide
ASPRGYSYDYFDY

SEQ ID NO: 658 - protein, 13 aa, Artificial Sequence
  Synthetic peptide
ARVCFGELLPIDY

SEQ ID NO: 659 - protein, 13 aa, Artificial Sequence
  Synthetic peptide
ARNLDYYYYGMDV

SEQ ID NO: 660 - protein, 13 aa, Artificial Sequence
  Synthetic peptide
ARDLGGYSFYFDY

SEQ ID NO: 661 - protein, 13 aa, Artificial Sequence
  Synthetic peptide
ARELVAGYYGMDV

SEQ ID NO: 662 - protein, 13 aa, Artificial Sequence
  Synthetic peptide
ARDRRGYSYGFDY

SEQ ID NO: 663 - protein, 13 aa, Artificial Sequence
  Synthetic peptide
ARDDSGYYYYMDV

SEQ ID NO: 664 - protein, 13 aa, Artificial Sequence
  Synthetic peptide
ARVLVVNYYGMDV

SEQ ID NO: 665 - protein, 13 aa, Artificial Sequence
  Synthetic peptide
AKTGGIAAAGFDY

SEQ ID NO: 666 - protein, 13 aa, Artificial Sequence
  Synthetic peptide
ARGYDILTGWVDY

SEQ ID NO: 667 - protein, 13 aa, Artificial Sequence
  Synthetic peptide
ARDRTDSSGYFDY

SEQ ID NO: 668 - protein, 13 aa, Artificial Sequence
  Synthetic peptide
ARGGGSYFSAFDI

SEQ ID NO: 669 - protein, 13 aa, Artificial Sequence
  Synthetic peptide
ARDLRLGPYGMDV

SEQ ID NO: 670 - protein, 13 aa, Artificial Sequence
  Synthetic peptide
ARDLYGYSYGEDY

SEQ ID NO: 671 - protein, 13 aa, Artificial Sequence
  Synthetic peptide
ARGGGSYFHWFDP

SEQ ID NO: 672 - protein, 13 aa, Artificial Sequence
  Synthetic peptide
ARLSSGYYSPFDY

SEQ ID NO: 673 - protein, 13 aa, Artificial Sequence
  Synthetic peptide
AREEQWPRGGFDY

SEQ ID NO: 674 - protein, 13 aa, Artificial Sequence
  Synthetic peptide
AREDIVATIQFDY

SEQ ID NO: 675 - protein, 13 aa, Artificial Sequence
  Synthetic peptide
AREGEVGATGVDY

SEQ ID NO: 676 - protein, 13 aa, Artificial Sequence
  Synthetic peptide
ARDLVGRLYYFDY

SEQ ID NO: 677 - protein, 13 aa, Artificial Sequence
  Synthetic peptide
ARGDFWSGFYMDV

SEQ ID NO: 678 - protein, 13 aa, Artificial Sequence
  Synthetic peptide
ARDFRFGESDTDY

SEQ ID NO: 679 - protein, 13 aa, Artificial Sequence
  Synthetic peptide
AREVAAPYNWFDP

SEQ ID NO: 680 - protein, 13 aa, Artificial Sequence
  Synthetic peptide
ARDGGYSYGDFDY

SEQ ID NO: 681 - protein, 13 aa, Artificial Sequence
  Synthetic peptide
ARAGSGSYTWFDP

SEQ ID NO: 682 - protein, 13 aa, Artificial Sequence
  Synthetic peptide
ARDGSGLYYGMDV

SEQ ID NO: 683 - protein, 13 aa, Artificial Sequence
  Synthetic peptide
ARELMVRGVIFDY

SEQ ID NO: 684 - protein, 13 aa, Artificial Sequence
  Synthetic peptide
AREGIVVVPEFDY

SEQ ID NO: 685 - protein, 13 aa, Artificial Sequence
  Synthetic peptide
AHRRGIAAAYFDY

SEQ ID NO: 686 - protein, 13 aa, Artificial Sequence
  Synthetic peptide
ARDGVGSYSYFDY

SEQ ID NO: 687 - protein, 13 aa, Artificial Sequence
  Synthetic peptide
AKAVDIVATIPDY

SEQ ID NO: 688 - protein, 13 aa, Artificial Sequence
  Synthetic peptide
AKDPSAVAGPLDY

SEQ ID NO: 689 - protein, 13 aa, Artificial Sequence
  Synthetic peptide
ARDYYYDSSGFSL

SEQ ID NO: 690 - protein, 13 aa, Artificial Sequence
  Synthetic peptide
ARQICGGDCPFDY

SEQ ID NO: 691 - protein, 13 aa, Artificial Sequence
  Synthetic peptide
ARDKGFGELEGDY

SEQ ID NO: 692 - protein, 13 aa, Artificial Sequence
  Synthetic peptide
ASALLWFGEPLDY

SEQ ID NO: 693 - protein, 13 aa, Artificial Sequence
  Synthetic peptide
AKGGGSYYDPFDY

SEQ ID NO: 694 - protein, 13 aa, Artificial Sequence
  Synthetic peptide
ARGYGDYVPNFDY

SEQ ID NO: 695 - protein, 13 aa, Artificial Sequence
  Synthetic peptide
ARGSGSYLVYFDY

SEQ ID NO: 696 - protein, 13 aa, Artificial Sequence
  Synthetic peptide
ARALKGGYNWFDP

SEQ ID NO: 697 - protein, 13 aa, Artificial Sequence
  Synthetic peptide
ARNYYDSSDAFDI

SEQ ID NO: 698 - protein, 13 aa, Artificial Sequence
  Synthetic peptide
ARDHGGWSYYFDY

SEQ ID NO: 699 - protein, 13 aa, Artificial Sequence
  Synthetic peptide
AREGYYDSRSLDY

SEQ ID NO: 700 - protein, 13 aa, Artificial Sequence
  Synthetic peptide
ARGEVVAAYYFDY

SEQ ID NO: 701 - protein, 13 aa, Artificial Sequence
  Synthetic peptide
ASPRGYSYGAFDY

SEQ ID NO: 702 - protein, 13 aa, Artificial Sequence
  Synthetic peptide
ARDKSGYSYGADY

SEQ ID NO: 703 - protein, 13 aa, Artificial Sequence
  Synthetic peptide
ARDLRLGELSFPY

SEQ ID NO: 704 - protein, 13 aa, Artificial Sequence
  Synthetic peptide
ARGGGGSYYFVDY

SEQ ID NO: 705 - protein, 13 aa, Artificial Sequence
  Synthetic peptide
ARDGMGPYYYMDV

SEQ ID NO: 706 - protein, 13 aa, Artificial Sequence
  Synthetic peptide
AREGVGATIYFDY

SEQ ID NO: 707 - protein, 13 aa, Artificial Sequence
  Synthetic peptide
ARDLRGSWYGMDV

SEQ ID NO: 708 - protein, 13 aa, Artificial Sequence
  Synthetic peptide
AGELLPFYYGMDV

SEQ ID NO: 709 - protein, 13 aa, Artificial Sequence
  Synthetic peptide
ARGFGGYYSPFDY

SEQ ID NO: 710 - protein, 13 aa, Artificial Sequence
  Synthetic peptide
ARVNMVRGVIIDY

SEQ ID NO: 711 - protein, 13 aa, Artificial Sequence
  Synthetic peptide
AGATYYYYYGMDV

SEQ ID NO: 712 - protein, 13 aa, Artificial Sequence
  Synthetic peptide
AREGAIAVAGLDY

SEQ ID NO: 713 - protein, 13 aa, Artificial Sequence
  Synthetic peptide
TRLDFWSCYYFDY

SEQ ID NO: 714 - protein, 13 aa, Artificial Sequence
  Synthetic peptide
ARGLGGNYYGMDV

SEQ ID NO: 715 - protein, 13 aa, Artificial Sequence
  Synthetic peptide
ARGLAAAAGTFDY

SEQ ID NO: 716 - protein, 14 aa, Artificial Sequence
  Synthetic peptide
ARPYSGSYRGYFDY

SEQ ID NO: 717 - protein, 14 aa, Artificial Sequence
  Synthetic peptide
ARPYTGSYSSWFDP

SEQ ID NO: 718 - protein, 14 aa, Artificial Sequence
  Synthetic peptide
ARDQSGSYLGPFDY

SEQ ID NO: 719 - protein, 14 aa, Artificial Sequence
  Synthetic peptide
ARAYSGSYSSYFDY

SEQ ID NO: 720 - protein, 14 aa, Artificial Sequence
  Synthetic peptide
ARSRGGSYSDAFDI

SEQ ID NO: 721 - protein, 14 aa, Artificial Sequence
  Synthetic peptide
ARPISGSYFSSFDY

SEQ ID NO: 722 - protein, 14 aa, Artificial Sequence
  Synthetic peptide
ARDNSGSYYGAFDI

SEQ ID NO: 723 - protein, 14 aa, Artificial Sequence
  Synthetic peptide
ARGYSGSYLYGMDV

SEQ ID NO: 724 - protein, 14 aa, Artificial Sequence
  Synthetic peptide
ARALGGNYYYGLDV

SEQ ID NO: 725 - protein, 14 aa, Artificial Sequence
  Synthetic peptide
ARTYSGSYLSAFDI

SEQ ID NO: 726 - protein, 14 aa, Artificial Sequence
  Synthetic peptide
ARVGSGSYLYYFDY

SEQ ID NO: 727 - protein, 14 aa, Artificial Sequence
  Synthetic peptide
ATGPAVAGTGWFDP

SEQ ID NO: 728 - protein, 14 aa, Artificial Sequence
  Synthetic peptide
ARAGSGSYRGFFDP

SEQ ID NO: 729 - protein, 14 aa, Artificial Sequence
  Synthetic peptide
ATGAAAGTFNWFDP

SEQ ID NO: 730 - protein, 14 aa, Artificial Sequence
  Synthetic peptide
ARSRGGSYYGGFDY

SEQ ID NO: 731 - protein, 14 aa, Artificial Sequence
  Synthetic peptide
ARATIGTYYYGMDV

SEQ ID NO: 732 - protein, 14 aa, Artificial Sequence
  Synthetic peptide
AHRPGDFWSGYFDY

SEQ ID NO: 733 - protein, 14 aa, Artificial Sequence
  Synthetic peptide
ARGYSGSYLSAFDI

SEQ ID NO: 734 - protein, 14 aa, Artificial Sequence
  Synthetic peptide
ARFSPYYYYYGMDV

SEQ ID NO: 735 - protein, 14 aa, Artificial Sequence
  Synthetic peptide
ARPRRGSYFDAFDI

SEQ ID NO: 736 - protein, 14 aa, Artificial Sequence
  Synthetic peptide
ARGHSGSYLAAFDI

SEQ ID NO: 737 - protein, 14 aa, Artificial Sequence
  Synthetic peptide
ARPGAGSYLYYFDY

SEQ ID NO: 738 - protein, 14 aa, Artificial Sequence
  Synthetic peptide
ATARIVGATNWFDP

SEQ ID NO: 739 - protein, 14 aa, Artificial Sequence
  Synthetic peptide
ARARSGSYFSWFDP

SEQ ID NO: 740 - protein, 14 aa, Artificial Sequence
  Synthetic peptide
ARDSSGSYYGPFDY

SEQ ID NO: 741 - protein, 14 aa, Artificial Sequence
  Synthetic peptide
ARAQGGGYYGAFDI

SEQ ID NO: 742 - protein, 14 aa, Artificial Sequence
  Synthetic peptide
ARARSGSYLNWFDP

SEQ ID NO: 743 - protein, 14 aa, Artificial Sequence
  Synthetic peptide
ARALWGNYYYGMDV

SEQ ID NO: 744 - protein, 14 aa, Artificial Sequence
  Synthetic peptide
ARAYDGGYYYGMDV

SEQ ID NO: 745 - protein, 14 aa, Artificial Sequence
  Synthetic peptide
ARPNSGSYWSFFDY

SEQ ID NO: 746 - protein, 14 aa, Artificial Sequence
  Synthetic peptide
ATAPIFGVVSWFDP

SEQ ID NO: 747 - protein, 14 aa, Artificial Sequence
  Synthetic peptide
AKGHSGSYYVYFDY

SEQ ID NO: 748 - protein, 14 aa, Artificial Sequence
  Synthetic peptide
ARDLVVVAATPLDY

SEQ ID NO: 749 - protein, 14 aa, Artificial Sequence
  Synthetic peptide
ARDLDYYDSSGFDY

SEQ ID NO: 750 - protein, 14 aa, Artificial Sequence
  Synthetic peptide
ARSGSGSYISRFDY

SEQ ID NO: 751 - protein, 14 aa, Artificial Sequence
  Synthetic peptide
ARTYSGSYYRGFDY

SEQ ID NO: 752 - protein, 14 aa, Artificial Sequence
  Synthetic peptide
ARAQSGSYVSPFDY

SEQ ID NO: 753 - protein, 14 aa, Artificial Sequence
  Synthetic peptide
ARSSSGSYYYGMDV

SEQ ID NO: 754 - protein, 14 aa, Artificial Sequence
  Synthetic peptide
ATAPPVAGHNWFDP

SEQ ID NO: 755 - protein, 14 aa, Artificial Sequence
  Synthetic peptide
AKTYSGSYRGWFDP

SEQ ID NO: 756 - protein, 14 aa, Artificial Sequence
  Synthetic peptide
ARAGSGSYYSHFDY

SEQ ID NO: 757 - protein, 14 aa, Artificial Sequence
  Synthetic peptide
ARGAYGGYEYYFDY

SEQ ID NO: 758 - protein, 14 aa, Artificial Sequence
  Synthetic peptide
ARETGDSSSSHFDY

SEQ ID NO: 759 - protein, 14 aa, Artificial Sequence
  Synthetic peptide
ARASSGSYYNAFDY

SEQ ID NO: 760 - protein, 14 aa, Artificial Sequence
  Synthetic peptide
ARDLTTVTTNHFDY

SEQ ID NO: 761 - protein, 14 aa, Artificial Sequence
  Synthetic peptide
AREGIVGATTGMDV

SEQ ID NO: 762 - protein, 14 aa, Artificial Sequence
  Synthetic peptide
ARSYSGSYWGPFDY

SEQ ID NO: 763 - protein, 14 aa, Artificial Sequence
  Synthetic peptide
ARAHSGSYFGWFDP

SEQ ID NO: 764 - protein, 14 aa, Artificial Sequence
  Synthetic peptide
ARGPVGYYYYYMDV

SEQ ID NO: 765 - protein, 14 aa, Artificial Sequence
  Synthetic peptide
ATGPVRGVPNWFDP

SEQ ID NO: 766 - protein, 14 aa, Artificial Sequence
  Synthetic peptide
ARGKGGSYRGPFDY

SEQ ID NO: 767 - protein, 14 aa, Artificial Sequence
  Synthetic peptide
ARGLGGHYYYGMDV

SEQ ID NO: 768 - protein, 14 aa, Artificial Sequence
  Synthetic peptide
ATGPPYGDYRWFDP

SEQ ID NO: 769 - protein, 14 aa, Artificial Sequence
  Synthetic peptide
AREDIVVATDAFDI

SEQ ID NO: 770 - protein, 14 aa, Artificial Sequence
  Synthetic peptide
AKPVGGNYYYGMDV

SEQ ID NO: 771 - protein, 14 aa, Artificial Sequence
  Synthetic peptide
ARDYDILTGYYFDY

SEQ ID NO: 772 - protein, 14 aa, Artificial Sequence
  Synthetic peptide
ATGPVVVRDNWFDP

SEQ ID NO: 773 - protein, 14 aa, Artificial Sequence
  Synthetic peptide
ATSPAAIRENWFDP

SEQ ID NO: 774 - protein, 14 aa, Artificial Sequence
  Synthetic peptide
ARGDSSGWYYYFDY

SEQ ID NO: 775 - protein, 14 aa, Artificial Sequence
  Synthetic peptide
ARTYSGSYSGHFDY

SEQ ID NO: 776 - protein, 14 aa, Artificial Sequence
  Synthetic peptide
ARADSGSYSAYFDY

SEQ ID NO: 777 - protein, 14 aa, Artificial Sequence
  Synthetic peptide
ARTNSGSYVSAFDI

SEQ ID NO: 778 - protein, 14 aa, Artificial Sequence
  Synthetic peptide
AKARGGSYLDAFDI

SEQ ID NO: 779 - protein, 14 aa, Artificial Sequence
  Synthetic peptide
ARPRSGSYRSLFDY

SEQ ID NO: 780 - protein, 14 aa, Artificial Sequence
  Synthetic peptide
ATAPLVGATWWFDP

SEQ ID NO: 781 - protein, 14 aa, Artificial Sequence
  Synthetic peptide
ATAPSTVTTAWFDP

SEQ ID NO: 782 - protein, 14 aa, Artificial Sequence
  Synthetic peptide
ATSTIFGVANWFDP

SEQ ID NO: 783 - protein, 14 aa, Artificial Sequence
  Synthetic peptide
ATTPVVVVAGWFDP

SEQ ID NO: 784 - protein, 14 aa, Artificial Sequence
  Synthetic peptide
ARAKSGSYYSAFDY

SEQ ID NO: 785 - protein, 14 aa, Artificial Sequence
  Synthetic peptide
ARAQSGSYYSPFDY

SEQ ID NO: 786 - protein, 14 aa, Artificial Sequence
  Synthetic peptide
AKAFGGGYYSPFDY

SEQ ID NO: 787 - protein, 14 aa, Artificial Sequence
  Synthetic peptide
ARIPIAVAGTASDY

SEQ ID NO: 788 - protein, 14 aa, Artificial Sequence
  Synthetic peptide
AKSRGGSYQDAFDI

SEQ ID NO: 789 - protein, 14 aa, Artificial Sequence
  Synthetic peptide
AKVGGGSYLYYFDY

SEQ ID NO: 790 - protein, 14 aa, Artificial Sequence
  Synthetic peptide
ARCGSGSYWSWFDP

SEQ ID NO: 791 - protein, 14 aa, Artificial Sequence
  Synthetic peptide
ARDRSGSYSFDFDY

SEQ ID NO: 792 - protein, 14 aa, Artificial Sequence
  Synthetic peptide
ARPTSGSYWDAFDI

SEQ ID NO: 793 - protein, 14 aa, Artificial Sequence
  Synthetic peptide
ARAGIAARPWYFDL

SEQ ID NO: 794 - protein, 14 aa, Artificial Sequence
  Synthetic peptide
ARDVRDYYYYGMDV

SEQ ID NO: 795 - protein, 14 aa, Artificial Sequence
  Synthetic peptide
AKGLSGSYYPPFDY

SEQ ID NO: 796 - protein, 14 aa, Artificial Sequence
  Synthetic peptide
ARDRSGSYHGGLDY

SEQ ID NO: 797 - protein, 14 aa, Artificial Sequence
  Synthetic peptide
ARDRDGDYYYGMDV

SEQ ID NO: 798 - protein, 14 aa, Artificial Sequence
  Synthetic peptide
ARAKGGSYFVAFDI

SEQ ID NO: 799 - protein, 14 aa, Artificial Sequence
  Synthetic peptide
ARPHSGSYYGPLDY

SEQ ID NO: 800 - protein, 14 aa, Artificial Sequence
  Synthetic peptide
ARGPGGSYYDYFDY

SEQ ID NO: 801 - protein, 14 aa, Artificial Sequence
  Synthetic peptide
ARGEGGSYYGPFDY

SEQ ID NO: 802 - protein, 14 aa, Artificial Sequence
  Synthetic peptide
ARLYSGSYRGHFDY

SEQ ID NO: 803 - protein, 14 aa, Artificial Sequence
  Synthetic peptide
ARDRRGGYSFTFDY

SEQ ID NO: 804 - protein, 14 aa, Artificial Sequence
  Synthetic peptide
ATTPAIFGVVRFDY

SEQ ID NO: 805 - protein, 14 aa, Artificial Sequence
  Synthetic peptide
ARSTAGTYYYGMDV

SEQ ID NO: 806 - protein, 14 aa, Artificial Sequence
  Synthetic peptide
ATSFAIFGVVYFDY

SEQ ID NO: 807 - protein, 14 aa, Artificial Sequence
  Synthetic peptide
AREPIAAAGYYFDY

SEQ ID NO: 808 - protein, 14 aa, Artificial Sequence
  Synthetic peptide
ARSYGGSYYNWFDP

SEQ ID NO: 809 - protein, 14 aa, Artificial Sequence
  Synthetic peptide
ASAYSGSYVGYFDY

SEQ ID NO: 810 - protein, 14 aa, Artificial Sequence
  Synthetic peptide
ARSHSGSYRGAFDI

SEQ ID NO: 811 - protein, 14 aa, Artificial Sequence
  Synthetic peptide
ARVRIAVAGSPFDY

SEQ ID NO: 812 - protein, 14 aa, Artificial Sequence
  Synthetic peptide
ARVRGGSYFGSFDY

SEQ ID NO: 813 - protein, 14 aa, Artificial Sequence
  Synthetic peptide
ARDLVAVAGYGMDV

SEQ ID NO: 814 - protein, 14 aa, Artificial Sequence
  Synthetic peptide
ARARGGSYFNAFDI

SEQ ID NO: 815 - protein, 14 aa, Artificial Sequence
  Synthetic peptide
ARECIAAAGDAFDI

SEQ ID NO: 816 - protein, 14 aa, Artificial Sequence
  Synthetic peptide
ARALSGSYGSAFDI

SEQ ID NO: 817 - protein, 14 aa, Artificial Sequence
  Synthetic peptide
ARSGSGSYYTYFDY

SEQ ID NO: 818 - protein, 14 aa, Artificial Sequence
  Synthetic peptide
ARGSGGSYRGYFDY

SEQ ID NO: 819 - protein, 14 aa, Artificial Sequence
  Synthetic peptide
ATSTTVTTSSWFDP

SEQ ID NO: 820 - protein, 14 aa, Artificial Sequence
  Synthetic peptide
AKSNRGSYYYGMDV

SEQ ID NO: 821 - protein, 14 aa, Artificial Sequence
  Synthetic peptide
ARDVTMVRGVPFDY

SEQ ID NO: 822 - protein, 14 aa, Artificial Sequence
  Synthetic peptide
ARGNYDILTGYFDY

SEQ ID NO: 823 - protein, 14 aa, Artificial Sequence
  Synthetic peptide
ARPSGGSYLAWFDP

SEQ ID NO: 824 - protein, 14 aa, Artificial Sequence
  Synthetic peptide
ARCEYSGYDCYFDY

SEQ ID NO: 825 - protein, 14 aa, Artificial Sequence
  Synthetic peptide
ARVRGGSYSYYFDY

SEQ ID NO: 826 - protein, 14 aa, Artificial Sequence
  Synthetic peptide
ARTHIAAAGTALDY

SEQ ID NO: 827 - protein, 14 aa, Artificial Sequence
  Synthetic peptide
ARPSSGYYLDYFDY

SEQ ID NO: 828 - protein, 14 aa, Artificial Sequence
  Synthetic peptide
ARAGYDFWSGYCDY

SEQ ID NO: 829 - protein, 14 aa, Artificial Sequence
  Synthetic peptide
ARAFSGSYVSWFDP

SEQ ID NO: 830 - protein, 14 aa, Artificial Sequence
  Synthetic peptide
ARDYSGSYSGLFDY

SEQ ID NO: 831 - protein, 14 aa, Artificial Sequence
  Synthetic peptide
ATSSIAARPDWFDP

SEQ ID NO: 832 - protein, 14 aa, Artificial Sequence
  Synthetic peptide
ARDITGTTLYGMDV

SEQ ID NO: 833 - protein, 14 aa, Artificial Sequence
  Synthetic peptide
ARPSGGNYASYFDY

SEQ ID NO: 834 - protein, 14 aa, Artificial Sequence
  Synthetic peptide
ARTRSGSYYSAFDI

SEQ ID NO: 835 - protein, 14 aa, Artificial Sequence
  Synthetic peptide
ARSVGGSYFGWFDP

SEQ ID NO: 836 - protein, 14 aa, Artificial Sequence
  Synthetic peptide
AKGVSGYYLDAFDI

SEQ ID NO: 837 - protein, 14 aa, Artificial Sequence
  Synthetic peptide
AKDGIYGDYDFFDY

SEQ ID NO: 838 - protein, 14 aa, Artificial Sequence
  Synthetic peptide
ASSTSGSYYGPFDY

SEQ ID NO: 839 - protein, 14 aa, Artificial Sequence
  Synthetic peptide
ARDLSGSYVGWFDP

SEQ ID NO: 840 - protein, 14 aa, Artificial Sequence
  Synthetic peptide
ARGYSGSYGVYFQH

SEQ ID NO: 841 - protein, 14 aa, Artificial Sequence
  Synthetic peptide
AREGIAVAGTGIDY

SEQ ID NO: 842 - protein, 14 aa, Artificial Sequence
  Synthetic peptide
ARTYSGSYTGWFDY

SEQ ID NO: 843 - protein, 14 aa, Artificial Sequence
  Synthetic peptide
ARMITMIVVNAFDI

SEQ ID NO: 844 - protein, 14 aa, Artificial Sequence
  Synthetic peptide
ARTYSGSYYNDFDY

SEQ ID NO: 845 - protein, 14 aa, Artificial Sequence
  Synthetic peptide
ARGPRGYSYGMIDY

SEQ ID NO: 846 - protein, 14 aa, Artificial Sequence
  Synthetic peptide
ARAYSGSYWAPFDY

SEQ ID NO: 847 - protein, 14 aa, Artificial Sequence
  Synthetic peptide
ARTTAGSYYYGMDV

SEQ ID NO: 848 - protein, 14 aa, Artificial Sequence
  Synthetic peptide
ARPLGGSYYAGFDY

SEQ ID NO: 849 - protein, 14 aa, Artificial Sequence
  Synthetic peptide
ARSWSGSYFAPFDY

SEQ ID NO: 850 - protein, 14 aa, Artificial Sequence
  Synthetic peptide
ARGASGSYRTPFDY

SEQ ID NO: 851 - protein, 14 aa, Artificial Sequence
  Synthetic peptide
ARMYSGSYYGYFDY

SEQ ID NO: 852 - protein, 14 aa, Artificial Sequence
  Synthetic peptide
ATALLPYYYYYMDV

SEQ ID NO: 853 - protein, 14 aa, Artificial Sequence
  Synthetic peptide
ARSGRGSYQNWFDP

SEQ ID NO: 854 - protein, 14 aa, Artificial Sequence
  Synthetic peptide
ARGYSGSYLVAFDI

SEQ ID NO: 855 - protein, 14 aa, Artificial Sequence
  Synthetic peptide
ARDFRGNYYYGMDV

SEQ ID NO: 856 - protein, 14 aa, Artificial Sequence
  Synthetic peptide
AKGRSGSYYSSFDY

SEQ ID NO: 857 - protein, 14 aa, Artificial Sequence
  Synthetic peptide
ARPSGGSYYSWFDP

SEQ ID NO: 858 - protein, 14 aa, Artificial Sequence
  Synthetic peptide
ATAPAAIATNWFDP

SEQ ID NO: 859 - protein, 14 aa, Artificial Sequence
  Synthetic peptide
ARPNSGSYLSNFDY

SEQ ID NO: 860 - protein, 14 aa, Artificial Sequence
  Synthetic peptide
ARPGGGSYFGAFDY

SEQ ID NO: 861 - protein, 14 aa, Artificial Sequence
  Synthetic peptide
ASAAMGSYYYGMDV

SEQ ID NO: 862 - protein, 14 aa, Artificial Sequence
  Synthetic peptide
ARSTGGSYYGGFDY

SEQ ID NO: 863 - protein, 14 aa, Artificial Sequence
  Synthetic peptide
ARGYSGSYLTYFQH

SEQ ID NO: 864 - protein, 14 aa, Artificial Sequence
  Synthetic peptide
ARVSLYYYYYGMDV

SEQ ID NO: 865 - protein, 14 aa, Artificial Sequence
  Synthetic peptide
AKDMYSSGWYVLDY

SEQ ID NO: 866 - protein, 14 aa, Artificial Sequence
  Synthetic peptide
AREGVTTVVTGLDY

SEQ ID NO: 867 - protein, 14 aa, Artificial Sequence
  Synthetic peptide
AKPSFGGYYYGMDV

SEQ ID NO: 868 - protein, 14 aa, Artificial Sequence
  Synthetic peptide
ATGTTVVTPGWFDP

SEQ ID NO: 869 - protein, 14 aa, Artificial Sequence
  Synthetic peptide
ATGSVVAATHWFDP

SEQ ID NO: 870 - protein, 14 aa, Artificial Sequence
  Synthetic peptide
ARVGSSGWYNWFDP

SEQ ID NO: 871 - protein, 14 aa, Artificial Sequence
  Synthetic peptide
AKSRSGSYSSSFDY

SEQ ID NO: 872 - protein, 14 aa, Artificial Sequence
  Synthetic peptide
AKLRSGSYYGAFDI

SEQ ID NO: 873 - protein, 14 aa, Artificial Sequence
  Synthetic peptide
ARSLSGSYFGGFDY

SEQ ID NO: 874 - protein, 14 aa, Artificial Sequence
  Synthetic peptide
ARIYSGSYLGRFDY

SEQ ID NO: 875 - protein, 14 aa, Artificial Sequence
  Synthetic peptide
ARSGSGSYYSHSDY

SEQ ID NO: 876 - protein, 14 aa, Artificial Sequence
  Synthetic peptide
ARDLVVPYYYGMDV

SEQ ID NO: 877 - protein, 14 aa, Artificial Sequence
  Synthetic peptide
ARANKATYYYGMDV

SEQ ID NO: 878 - protein, 14 aa, Artificial Sequence
  Synthetic peptide
ARSSRGSYYDAFDI

SEQ ID NO: 879 - protein, 14 aa, Artificial Sequence
  Synthetic peptide
ARVKGGSYWDAFDI

SEQ ID NO: 880 - protein, 14 aa, Artificial Sequence
  Synthetic peptide
ARALGGSYGAPFDY

SEQ ID NO: 881 - protein, 14 aa, Artificial Sequence
  Synthetic peptide
ARDKSGSYVFLFDY

SEQ ID NO: 882 - protein, 14 aa, Artificial Sequence
  Synthetic peptide
ARPNSGSYTDYFDY

SEQ ID NO: 883 - protein, 14 aa, Artificial Sequence
  Synthetic peptide
ARVLGGSYYSGMDV

SEQ ID NO: 884 - protein, 14 aa, Artificial Sequence
  Synthetic peptide
ARPRGGSYTGYVDY

SEQ ID NO: 885 - protein, 14 aa, Artificial Sequence
  Synthetic peptide
ARSSSGSYRSYFDY

SEQ ID NO: 886 - protein, 14 aa, Artificial Sequence
  Synthetic peptide
AGGYYYYYYYGMDV

SEQ ID NO: 887 - protein, 14 aa, Artificial Sequence
  Synthetic peptide
ARVSSGSYRGAFDI

SEQ ID NO: 888 - protein, 14 aa, Artificial Sequence
  Synthetic peptide
ARSLWGSYRSPFDY

SEQ ID NO: 889 - protein, 14 aa, Artificial Sequence
  Synthetic peptide
ARVKSGSYRGVFDY

SEQ ID NO: 890 - protein, 14 aa, Artificial Sequence
  Synthetic peptide
ARAQSGSYWNAFDI

SEQ ID NO: 891 - protein, 14 aa, Artificial Sequence
  Synthetic peptide
ASVLAIFGVVYFDY

SEQ ID NO: 892 - protein, 14 aa, Artificial Sequence
  Synthetic peptide
ARDIAVAGEDAFDI

SEQ ID NO: 893 - protein, 14 aa, Artificial Sequence
  Synthetic peptide
AKANYANYYYGMDV

SEQ ID NO: 894 - protein, 14 aa, Artificial Sequence
  Synthetic peptide
ARDSYDFWSGYPDY

SEQ ID NO: 895 - protein, 14 aa, Artificial Sequence
  Synthetic peptide
ARPGSGSYYSYFDY

SEQ ID NO: 896 - protein, 14 aa, Artificial Sequence
  Synthetic peptide
ARDLVGGYSYYFDY

SEQ ID NO: 897 - protein, 14 aa, Artificial Sequence
  Synthetic peptide
ARGGGSGWSYYFDY

SEQ ID NO: 898 - protein, 14 aa, Artificial Sequence
  Synthetic peptide
AKSLGGSYYSAFDI

SEQ ID NO: 899 - protein, 14 aa, Artificial Sequence
  Synthetic peptide
ARAKGGSYYYGMDV

SEQ ID NO: 900 - protein, 14 aa, Artificial Sequence
  Synthetic peptide
ARIHVAAAGIPFDS

SEQ ID NO: 901 - protein, 14 aa, Artificial Sequence
  Synthetic peptide
ARGGYSSRYWYFDL

SEQ ID NO: 902 - protein, 14 aa, Artificial Sequence
  Synthetic peptide
ARGLRFLEWFYFDY

SEQ ID NO: 903 - protein, 15 aa, Artificial Sequence
  Synthetic peptide
ARDPYYDILTGYYNY

SEQ ID NO: 904 - protein, 15 aa, Artificial Sequence
  Synthetic peptide
ATAPGIAAAGYWFDP

SEQ ID NO: 905 - protein, 15 aa, Artificial Sequence
  Synthetic peptide
ARGSYYYDSSGYVDY

SEQ ID NO: 906 - protein, 15 aa, Artificial Sequence
  Synthetic peptide
ARAPTSISNPYYFDH

SEQ ID NO: 907 - protein, 15 aa, Artificial Sequence
  Synthetic peptide
ATGPVVPAAIGWFDP

SEQ ID NO: 908 - protein, 15 aa, Artificial Sequence
  Synthetic peptide
ARVDYYDSSGYYRDY

SEQ ID NO: 909 - protein, 15 aa, Artificial Sequence
  Synthetic peptide
AKGDWYSSSWYPFDY

SEQ ID NO: 910 - protein, 15 aa, Artificial Sequence
  Synthetic peptide
AKDERRYDILTGYDY

SEQ ID NO: 911 - protein, 15 aa, Artificial Sequence
  Synthetic peptide
ARDGYYDILTGYYSA

SEQ ID NO: 912 - protein, 15 aa, Artificial Sequence
  Synthetic peptide
AKDLGPDYGDYGPDY

SEQ ID NO: 913 - protein, 15 aa, Artificial Sequence
  Synthetic peptide
ARDGSGSYLYYGMDV

SEQ ID NO: 914 - protein, 15 aa, Artificial Sequence
  Synthetic peptide
ARDSGYDSSGYYEDY

SEQ ID NO: 915 - protein, 15 aa, Artificial Sequence
  Synthetic peptide
ARDSHYYDSSGLLDY

SEQ ID NO: 916 - protein, 15 aa, Artificial Sequence
  Synthetic peptide
ARVGCSSTSCYQFDY

SEQ ID NO: 917 - protein, 15 aa, Artificial Sequence
  Synthetic peptide
ARDSYDSSGWDWFDP

SEQ ID NO: 918 - protein, 15 aa, Artificial Sequence
  Synthetic peptide
AKDMTAFSYYYGMDV

SEQ ID NO: 919 - protein, 15 aa, Artificial Sequence
  Synthetic peptide
ARDLMTTVTTGWFDP

SEQ ID NO: 920 - protein, 15 aa, Artificial Sequence
  Synthetic peptide
AKDSPLYDILTGYDY

SEQ ID NO: 921 - protein, 15 aa, Artificial Sequence
  Synthetic peptide
AKNPEPYDYGDYFDY

SEQ ID NO: 922 - protein, 15 aa, Artificial Sequence
  Synthetic peptide
ARDAHYDILTGYWDY

SEQ ID NO: 923 - protein, 15 aa, Artificial Sequence
  Synthetic peptide
AKALYYYGSGSYLDY

SEQ ID NO: 924 - protein, 15 aa, Artificial Sequence
  Synthetic peptide
ARGPHYYDSSGYFDY

SEQ ID NO: 925 - protein, 15 aa, Artificial Sequence
  Synthetic peptide
ARDLSIAAAGTAFDY

SEQ ID NO: 926 - protein, 15 aa, Artificial Sequence
  Synthetic peptide
ARVGCSSTSCSAFDI

SEQ ID NO: 927 - protein, 15 aa, Artificial Sequence
  Synthetic peptide
AREGRFGELSGAFDI

SEQ ID NO: 928 - protein, 15 aa, Artificial Sequence
  Synthetic peptide
AKDRSGSYGYYGMDV

SEQ ID NO: 929 - protein, 15 aa, Artificial Sequence
  Synthetic peptide
ARDIVVVPAAYGMDV

SEQ ID NO: 930 - protein, 15 aa, Artificial Sequence
  Synthetic peptide
ARGYCSSTSCYQFDP

SEQ ID NO: 931 - protein, 15 aa, Artificial Sequence
  Synthetic peptide
ARGLGGPDYYYGMDV

SEQ ID NO: 932 - protein, 15 aa, Artificial Sequence
  Synthetic peptide
ARAMVRGVIVYYFDY

SEQ ID NO: 933 - protein, 15 aa, Artificial Sequence
  Synthetic peptide
AHTYYYDSSGYDFDY

SEQ ID NO: 934 - protein, 15 aa, Artificial Sequence
  Synthetic peptide
ARGGRPPYYYYYMDV

SEQ ID NO: 935 - protein, 15 aa, Artificial Sequence
  Synthetic peptide
AKDIEGDYYYYGMDV

SEQ ID NO: 936 - protein, 15 aa, Artificial Sequence
  Synthetic peptide
AKGGWYYDSSGYLDY

SEQ ID NO: 937 - protein, 15 aa, Artificial Sequence
  Synthetic peptide
AREGLYGDYGGGFDY

SEQ ID NO: 938 - protein, 15 aa, Artificial Sequence
  Synthetic peptide
ARDMDSSGYYYGMDV

SEQ ID NO: 939 - protein, 15 aa, Artificial Sequence
  Synthetic peptide
ARDGDSGSYYVWFDP

SEQ ID NO: 940 - protein, 15 aa, Artificial Sequence
  Synthetic peptide
ARVLLWFGELSGNDY

SEQ ID NO: 941 - protein, 15 aa, Artificial Sequence
  Synthetic peptide
AKVVGDSSGNNWFDP

SEQ ID NO: 942 - protein, 15 aa, Artificial Sequence
  Synthetic peptide
ASLRGGGYSYAPFDY

SEQ ID NO: 943 - protein, 15 aa, Artificial Sequence
  Synthetic peptide
AKDCGYSYGYSWFDP

SEQ ID NO: 944 - protein, 15 aa, Artificial Sequence
  Synthetic peptide
ARAAASGSYFNWFDP

SEQ ID NO: 945 - protein, 15 aa, Artificial Sequence
  Synthetic peptide
ARGGETYYYYYGMDV

SEQ ID NO: 946 - protein, 15 aa, Artificial Sequence
  Synthetic peptide
AKDTFGGVIVSLFDY

SEQ ID NO: 947 - protein, 15 aa, Artificial Sequence
  Synthetic peptide
ARGPHYYDSSGPAGY

SEQ ID NO: 948 - protein, 16 aa, Artificial Sequence
  Synthetic peptide
RAVPAAIDYYYYGMDV

SEQ ID NO: 949 - protein, 16 aa, Artificial Sequence
  Synthetic peptide
AKAYCSSTSCLNWFDP

SEQ ID NO: 950 - protein, 16 aa, Artificial Sequence
  Synthetic peptide
ASDYYDSSGYYYGMDV

SEQ ID NO: 951 - protein, 16 aa, Artificial Sequence
  Synthetic peptide
AKGGYSYGYPGYYFDY

SEQ ID NO: 952 - protein, 16 aa, Artificial Sequence
  Synthetic peptide
ARDGLSSSWSEYYFDY

SEQ ID NO: 953 - protein, 16 aa, Artificial Sequence
  Synthetic peptide
ATGPGIAAAGSRWFDP

SEQ ID NO: 954 - protein, 16 aa, Artificial Sequence
  Synthetic peptide
AKDGGDDYGDYGPFDY

SEQ ID NO: 955 - protein, 16 aa, Artificial Sequence
  Synthetic peptide
AVDTATDYYYYYGMDV

SEQ ID NO: 956 - protein, 16 aa, Artificial Sequence
  Synthetic peptide
ARDDYDSSGYSWGMDV

SEQ ID NO: 957 - protein, 16 aa, Artificial Sequence
  Synthetic peptide
ARDYYDSSGYSNGFDY

SEQ ID NO: 958 - protein, 16 aa, Artificial Sequence
  Synthetic peptide
AKDKDDGYYYYYYMDV

SEQ ID NO: 959 - protein, 16 aa, Artificial Sequence
  Synthetic peptide
ARLGSGSYYYYYGMDV

SEQ ID NO: 960 - protein, 16 aa, Artificial Sequence
  Synthetic peptide
AKSGYSYGYQPYYFDY

SEQ ID NO: 961 - protein, 16 aa, Artificial Sequence
  Synthetic peptide
AKDQTIVVVPAATFDY

SEQ ID NO: 962 - protein, 16 aa, Artificial Sequence
  Synthetic peptide
ARDRVGSSGWDYYFDY

SEQ ID NO: 963 - protein, 16 aa, Artificial Sequence
  Synthetic peptide
ARDYDFWSGYYGWFDP

SEQ ID NO: 964 - protein, 16 aa, Artificial Sequence
  Synthetic peptide
ATGPAIAAAATGWFDP

SEQ ID NO: 965 - protein, 16 aa, Artificial Sequence
  Synthetic peptide
ARDHYDYVWGSYRYGV

SEQ ID NO: 966 - protein, 16 aa, Artificial Sequence
  Synthetic peptide
ARGGYSSSHYYYGMDV

SEQ ID NO: 967 - protein, 16 aa, Artificial Sequence
  Synthetic peptide
ARDHDILTGYSDAFDI

SEQ ID NO: 968 - protein, 16 aa, Artificial Sequence
  Synthetic peptide
ATHLAYCGGDCYSFDY

SEQ ID NO: 969 - protein, 16 aa, Artificial Sequence
  Synthetic peptide
ARGGYYYDSSGYHMDY

SEQ ID NO: 970 - protein, 16 aa, Artificial Sequence
  Synthetic peptide
AKTVAGHYYYYYGMDV

SEQ ID NO: 971 - protein, 16 aa, Artificial Sequence
  Synthetic peptide
ARVHDSSGYYYPLFDY

SEQ ID NO: 972 - protein, 16 aa, Artificial Sequence
  Synthetic peptide
AKDGDSSGYYSDAFDI

SEQ ID NO: 973 - protein, 16 aa, Artificial Sequence
  Synthetic peptide
AREGYSSSWADLYFDY

SEQ ID NO: 974 - protein, 16 aa, Artificial Sequence
  Synthetic peptide
ARLNYYDSSGYSEFDY

SEQ ID NO: 975 - protein, 16 aa, Artificial Sequence
  Synthetic peptide
ARAYYDSSGYYLYFDY

SEQ ID NO: 976 - protein, 16 aa, Artificial Sequence
  Synthetic peptide
AKDLEASGSYHDAFDI

SEQ ID NO: 977 - protein, 16 aa, Artificial Sequence
  Synthetic peptide
ARESAIVVVPAAPFDY

SEQ ID NO: 978 - protein, 16 aa, Artificial Sequence
  Synthetic peptide
AKGGYSYGYDRYYFDY

SEQ ID NO: 979 - protein, 16 aa, Artificial Sequence
  Synthetic peptide
AAVGCSGGSCPDAFDI

SEQ ID NO: 980 - protein, 16 aa, Artificial Sequence
  Synthetic peptide
ARGVGATSYYYYGMDV

SEQ ID NO: 981 - protein, 16 aa, Artificial Sequence
  Synthetic peptide
ASNYGDYANYYYGMDV

SEQ ID NO: 982 - protein, 16 aa, Artificial Sequence
  Synthetic peptide
ARLYCTNGVCSGYFDY

SEQ ID NO: 983 - protein, 16 aa, Artificial Sequence
  Synthetic peptide
ARVLGYCSSTSCYPDY

SEQ ID NO: 984 - protein, 16 aa, Artificial Sequence
  Synthetic peptide
ARGPYYYDSSGYFFDY

SEQ ID NO: 985 - protein, 16 aa, Artificial Sequence
  Synthetic peptide
ATGPPIAVAGSNWFDP

SEQ ID NO: 986 - protein, 17 aa, Artificial Sequence
  Synthetic peptide
ARHLLWFGEFNLDAFDI

SEQ ID NO: 987 - protein, 17 aa, Artificial Sequence
  Synthetic peptide
ARAGEGGSYYYYYGMDV

SEQ ID NO: 988 - protein, 17 aa, Artificial Sequence
  Synthetic peptide
ARTTYDILTGYYNAFDI

SEQ ID NO: 989 - protein, 17 aa, Artificial Sequence
  Synthetic peptide
AHSYYDILTGYTWAFDI

SEQ ID NO: 990 - protein, 17 aa, Artificial Sequence
  Synthetic peptide
ASIAAAEGLYYYYGMDV

SEQ ID NO: 991 - protein, 17 aa, Artificial Sequence
  Synthetic peptide
ARAPRNTIFGVVSAFDI

SEQ ID NO: 992 - protein, 17 aa, Artificial Sequence
  Synthetic peptide
ARVPRITIFGVVQHFDY

SEQ ID NO: 993 - protein, 17 aa, Artificial Sequence
  Synthetic peptide
ARDADSSGSYYYYGMDV

SEQ ID NO: 994 - protein, 17 aa, Artificial Sequence
  Synthetic peptide
ARTGYSSSWYYYYGMDV

SEQ ID NO: 995 - protein, 17 aa, Artificial Sequence
  Synthetic peptide
ARGGYSYTNYYYYGMDV

SEQ ID NO: 996 - protein, 17 aa, Artificial Sequence
  Synthetic peptide
ARDRDIVVVPAAVYFDY

SEQ ID NO: 997 - protein, 17 aa, Artificial Sequence
  Synthetic peptide
ATALAYCGGDCQYYFDY

SEQ ID NO: 998 - protein, 17 aa, Artificial Sequence
  Synthetic peptide
ARGLWSSVGYYYYYMDV

SEQ ID NO: 999 - protein, 17 aa, Artificial Sequence
  Synthetic peptide
AHLYYDILTGYSNWFDP

SEQ ID NO: 1000 - protein, 17 aa, Artificial Sequence
  Synthetic peptide
AREGYSSSWYHSNWFDP

SEQ ID NO: 1001 - protein, 17 aa, Artificial Sequence
  Synthetic peptide
ARDLSGYDYYYYYGMDV

SEQ ID NO: 1002 - protein, 17 aa, Artificial Sequence
  Synthetic peptide
ARGYCTNGVCYIDAFDI

SEQ ID NO: 1003 - protein, 17 aa, Artificial Sequence
  Synthetic peptide
ARTYYYDSSGYHDAFDI

SEQ ID NO: 1004 - protein, 17 aa, Artificial Sequence
  Synthetic peptide
ATDFAYCGGDCYPRFDY

SEQ ID NO: 1005 - protein, 17 aa, Artificial Sequence
  Synthetic peptide
ATSFAYCGGDCYSYFDY

SEQ ID NO: 1006 - protein, 17 aa, Artificial Sequence
  Synthetic peptide
ARHYYDSSGYSALNFDY

SEQ ID NO: 1007 - protein, 17 aa, Artificial Sequence
  Synthetic peptide
AEYCSSTSCYANDAFDI

SEQ ID NO: 1008 - protein, 17 aa, Artificial Sequence
  Synthetic peptide
ATAMAYCGGDCYSWFDP

SEQ ID NO: 1009 - protein, 17 aa, Artificial Sequence
  Synthetic peptide
  MOD_RES (11)..(11): Any amino acid
AKDRSGWYLYXYYGMDV

SEQ ID NO: 1010 - protein, 17 aa, Artificial Sequence
  Synthetic peptide
ARSGYSSGWKYYYGMDV

SEQ ID NO: 1011 - protein, 17 aa, Artificial Sequence
  Synthetic peptide
ARDQYYYDSSGYPVFDY

SEQ ID NO: 1012 - protein, 17 aa, Artificial Sequence
  Synthetic peptide
ARIVYDILTGYYTYFDY

SEQ ID NO: 1013 - protein, 17 aa, Artificial Sequence
  Synthetic peptide
ARIRYDILTGYYIGKDY

SEQ ID NO: 1014 - protein, 17 aa, Artificial Sequence
  Synthetic peptide
AKDYYDSSGYYYYGMDV

SEQ ID NO: 1015 - protein, 17 aa, Artificial Sequence
  Synthetic peptide
ARKNYYDSSGYYAPFDY

SEQ ID NO: 1016 - protein, 18 aa, Artificial Sequence
  Synthetic peptide
ARDTGAVAGTDYYYGMDV

SEQ ID NO: 1017 - protein, 18 aa, Artificial Sequence
  Synthetic peptide
ARDLTTVTTYHYYYGMDV

SEQ ID NO: 1018 - protein, 18 aa, Artificial Sequence
  Synthetic peptide
ARDMIAAAGNYYYYGMDV

SEQ ID NO: 1019 - protein, 18 aa, Artificial Sequence
  Synthetic peptide
ARAGYSSSWYGAAEYFQH

SEQ ID NO: 1020 - protein, 18 aa, Artificial Sequence
  Synthetic peptide
ATLAAAGPESYYYYGMDV

SEQ ID NO: 1021 - protein, 18 aa, Artificial Sequence
  Synthetic peptide
ARDEYCSSTSCYYYGMDV

SEQ ID NO: 1022 - protein, 18 aa, Artificial Sequence
  Synthetic peptide
ARDLYSSEDYYYYYGMDV

SEQ ID NO: 1023 - protein, 18 aa, Artificial Sequence
  Synthetic peptide
ARGPYSSGWYGLKYWFDP

SEQ ID NO: 1024 - protein, 18 aa, Artificial Sequence
  Synthetic peptide
ARGRYSSSWYGLKYGMDV

SEQ ID NO: 1025 - protein, 18 aa, Artificial Sequence
  Synthetic peptide
ARIILDCSGGSCYWLGDY

SEQ ID NO: 1026 - protein, 18 aa, Artificial Sequence
  Synthetic peptide
ARGDVGYCSGGSCYWFDP

SEQ ID NO: 1027 - protein, 18 aa, Artificial Sequence
  Synthetic peptide
ARSGYSSSSGYYYYGMDV

SEQ ID NO: 1028 - protein, 18 aa, Artificial Sequence
  Synthetic peptide
AKAEHCSGGSCYYYGMDV

SEQ ID NO: 1029 - protein, 18 aa, Artificial Sequence
  Synthetic peptide
ARDIAAAGQDYYYYGMDV

SEQ ID NO: 1030 - protein, 18 aa, Artificial Sequence
  Synthetic peptide
ARDGSYYYDSSGYSDFDY

SEQ ID NO: 1031 - protein, 18 aa, Artificial Sequence
  Synthetic peptide
ARGPYSSDWYGRRDWFDP

SEQ ID NO: 1032 - protein, 18 aa, Artificial Sequence
  Synthetic peptide
ARDMVAVAGTYYYYGMDV

SEQ ID NO: 1033 - protein, 18 aa, Artificial Sequence
  Synthetic peptide
ARGRYSSSWYGARDAFDI

SEQ ID NO: 1034 - protein, 18 aa, Artificial Sequence
  Synthetic peptide
ARGRYSSSWYGIKSGFDP

SEQ ID NO: 1035 - protein, 18 aa, Artificial Sequence
  Synthetic peptide
ATSPGYCSGGSCSNWFDP

SEQ ID NO: 1036 - protein, 18 aa, Artificial Sequence
  Synthetic peptide
ARDWTAVADADYYYGMDV

SEQ ID NO: 1037 - protein, 18 aa, Artificial Sequence
  Synthetic peptide
ARDLTGTTGLEYYYGMDV

SEQ ID NO: 1038 - protein, 18 aa, Artificial Sequence
  Synthetic peptide
ARMPYYYDSSGYRAAFDI

SEQ ID NO: 1039 - protein, 18 aa, Artificial Sequence
  Synthetic peptide
ARGRHSSSWYDRRSWFDP

SEQ ID NO: 1040 - protein, 18 aa, Artificial Sequence
  Synthetic peptide
ARGGYSYGYYQYYYHMDV

SEQ ID NO: 1041 - protein, 18 aa, Artificial Sequence
  Synthetic peptide
ARDGYSGSYYYYYYGMDV

SEQ ID NO: 1042 - protein, 18 aa, Artificial Sequence
  Synthetic peptide
AIPHCSSTSCYYYYGMDV

SEQ ID NO: 1043 - protein, 18 aa, Artificial Sequence
  Synthetic peptide
AKQYYGSGSYYKYYGMDV

SEQ ID NO: 1044 - protein, 18 aa, Artificial Sequence
  Synthetic peptide
ARDSLVAAADPYYYGMDV

SEQ ID NO: 1045 - protein, 18 aa, Artificial Sequence
  Synthetic peptide
ASNYDILTGYYGYYGMDV

SEQ ID NO: 1046 - protein, 18 aa, Artificial Sequence
  Synthetic peptide
ARHQAYCSGGSCYYYFDY

SEQ ID NO: 1047 - protein, 18 aa, Artificial Sequence
  Synthetic peptide
ARDSLVVAATTYYYGMDV

SEQ ID NO: 1048 - protein, 18 aa, Artificial Sequence
  Synthetic peptide
ARAGYSSSWYGGRHWFDP

SEQ ID NO: 1049 - protein, 18 aa, Artificial Sequence
  Synthetic peptide
ARHVRYCSSTSCYDMFDY

SEQ ID NO: 1050 - protein, 18 aa, Artificial Sequence
  Synthetic peptide
ARDMHSGYDQYYYYGMDV

SEQ ID NO: 1051 - protein, 18 aa, Artificial Sequence
  Synthetic peptide
TTERVYDYVWGSYREFDY

SEQ ID NO: 1052 - protein, 18 aa, Artificial Sequence
  Synthetic peptide
ARGTGYYDSSGYPYYFDY

SEQ ID NO: 1053 - protein, 18 aa, Artificial Sequence
  Synthetic peptide
ARDAMVRGVNYYYFGMGV

SEQ ID NO: 1054 - protein, 18 aa, Artificial Sequence
  Synthetic peptide
ARILSDCSGGSCYFPFDY

SEQ ID NO: 1055 - protein, 18 aa, Artificial Sequence
  Synthetic peptide
AKLGIAVAGSYYYYGMDV

SEQ ID NO: 1056 - protein, 18 aa, Artificial Sequence
  Synthetic peptide
ARDAVAVAGKHYYYGMDV

SEQ ID NO: 1057 - protein, 18 aa, Artificial Sequence
  Synthetic peptide
ARDVYCSSTSCYYYGMDV

SEQ ID NO: 1058 - protein, 18 aa, Artificial Sequence
  Synthetic peptide
ARGSGTIFGVVIIGWFDP

SEQ ID NO: 1059 - protein, 18 aa, Artificial Sequence
  Synthetic peptide
ARTASGYCSSTSCYYFDY

SEQ ID NO: 1060 - protein, 18 aa, Artificial Sequence
  Synthetic peptide
ARGGYSSSWYGEKYYFDY

SEQ ID NO: 1061 - protein, 18 aa, Artificial Sequence
  Synthetic peptide
ARVGSSWSLGYYYYGMDV

SEQ ID NO: 1062 - protein, 18 aa, Artificial Sequence
  Synthetic peptide
ARGGHSSSWYQTRNWFDP

SEQ ID NO: 1063 - protein, 18 aa, Artificial Sequence
  Synthetic peptide
ARGEVGSSWYGVKYYFDY

SEQ ID NO: 1064 - protein, 18 aa, Artificial Sequence
  Synthetic peptide
ARGGYSYGYFHYYYYMDV

SEQ ID NO: 1065 - protein, 18 aa, Artificial Sequence
  Synthetic peptide
ARTGYSSSWYKLYYGMDV

SEQ ID NO: 1066 - protein, 18 aa, Artificial Sequence
  Synthetic peptide
ASIAAAELRLYYYYGMDV

SEQ ID NO: 1067 - protein, 18 aa, Artificial Sequence
  Synthetic peptide
ARGLPVTTFVHYYYGMDV

SEQ ID NO: 1068 - protein, 18 aa, Artificial Sequence
  Synthetic peptide
ARDPPTTVHNYYYYGMDV

SEQ ID NO: 1069 - protein, 18 aa, Artificial Sequence
  Synthetic peptide
ARDPSGYCSSTSCYVFDY

SEQ ID NO: 1070 - protein, 18 aa, Artificial Sequence
  Synthetic peptide
ARQIRYCSGGSCWDWFDP

SEQ ID NO: 1071 - protein, 18 aa, Artificial Sequence
  Synthetic peptide
ARDIVVVPAAYYYYGMDV

SEQ ID NO: 1072 - protein, 18 aa, Artificial Sequence
  Synthetic peptide
ARAGWGRRDYYYYYGMDV

SEQ ID NO: 1073 - protein, 18 aa, Artificial Sequence
  Synthetic peptide
AKDLTYYYDSSGWGYFDY

SEQ ID NO: 1074 - protein, 18 aa, Artificial Sequence
  Synthetic peptide
ARDDPPTYYYDSSGYFDY

SEQ ID NO: 1075 - protein, 18 aa, Artificial Sequence
  Synthetic peptide
ARDLAVAATYYYYYGMDV

SEQ ID NO: 1076 - protein, 18 aa, Artificial Sequence
  Synthetic peptide
ARDFIAVAGNYYYYGMDV

SEQ ID NO: 1077 - protein, 18 aa, Artificial Sequence
  Synthetic peptide
AKDGRGPYYYDSSGYFDY

SEQ ID NO: 1078 - protein, 18 aa, Artificial Sequence
  Synthetic peptide
ARGGWNYAGGDYYYYMDV

SEQ ID NO: 1079 - protein, 18 aa, Artificial Sequence
  Synthetic peptide
ARGTYSSSWYGPPRAFDI

SEQ ID NO: 1080 - protein, 18 aa, Artificial Sequence
  Synthetic peptide
AKGALIVGATYYYYGMDV

SEQ ID NO: 1081 - protein, 18 aa, Artificial Sequence
  Synthetic peptide
ARDLWRYSGDYYYYGMDV

SEQ ID NO: 1082 - protein, 18 aa, Artificial Sequence
  Synthetic peptide
AKDKDVLLWFGSSGGFDY

SEQ ID NO: 1083 - protein, 18 aa, Artificial Sequence
  Synthetic peptide
AKDYGGNEGDYYYYGMDV

SEQ ID NO: 1084 - protein, 19 aa, Artificial Sequence
  Synthetic peptide
ATAPAYCSSTSCRLNWFDP

SEQ ID NO: 1085 - protein, 19 aa, Artificial Sequence
  Synthetic peptide
TTGTWYYDSSGYSNDAFDI

SEQ ID NO: 1086 - protein, 19 aa, Artificial Sequence
  Synthetic peptide
ARHPLYCSSTSCYEFWFDP

SEQ ID NO: 1087 - protein, 19 aa, Artificial Sequence
  Synthetic peptide
AREGYYDSSGYYNHDAFDI

SEQ ID NO: 1088 - protein, 19 aa, Artificial Sequence
  Synthetic peptide
ARGGASSSWLYYYYYGMDV

SEQ ID NO: 1089 - protein, 19 aa, Artificial Sequence
  Synthetic peptide
ARALYYYDSSGYGINWFDP

SEQ ID NO: 1090 - protein, 19 aa, Artificial Sequence
  Synthetic peptide
ARGPRYSSSWYGDRNWFDP

SEQ ID NO: 1091 - protein, 19 aa, Artificial Sequence
  Synthetic peptide
ATGPPYCSGGSCYSNWFDP

SEQ ID NO: 1092 - protein, 19 aa, Artificial Sequence
  Synthetic peptide
ARHPLYCSSTSCYEYYFDY

SEQ ID NO: 1093 - protein, 19 aa, Artificial Sequence
  Synthetic peptide
AREGLGYCSGGSCARAFDI

SEQ ID NO: 1094 - protein, 19 aa, Artificial Sequence
  Synthetic peptide
ARDRSIVVAGYYYYYGMDV

SEQ ID NO: 1095 - protein, 19 aa, Artificial Sequence
  Synthetic peptide
ARGIVVVPAAHYYYYGMDV

SEQ ID NO: 1096 - protein, 19 aa, Artificial Sequence
  Synthetic peptide
ARLQREVTIFGVVISPIDY

SEQ ID NO: 1097 - protein, 19 aa, Artificial Sequence
  Synthetic peptide
AKDYYGSGTGDYYYYGMDV

SEQ ID NO: 1098 - protein, 19 aa, Artificial Sequence
  Synthetic peptide
ARGGWGSGRPYYYYYYMDV

SEQ ID NO: 1099 - protein, 19 aa, Artificial Sequence
  Synthetic peptide
ARVALGYCSSTSCQNAFDI

SEQ ID NO: 1100 - protein, 19 aa, Artificial Sequence
  Synthetic peptide
TTVLHYYDSSGYSNDAFDI

SEQ ID NO: 1101 - protein, 19 aa, Artificial Sequence
  Synthetic peptide
ARGIVVVPAASYYYYGMDV

SEQ ID NO: 1102 - protein, 19 aa, Artificial Sequence
  Synthetic peptide
AKRPGAYCGGDCYSGYFDY

SEQ ID NO: 1103 - protein, 19 aa, Artificial Sequence
  Synthetic peptide
ARGGYSYANRYYYYYYMDV

SEQ ID NO: 1104 - protein, 19 aa, Artificial Sequence
  Synthetic peptide
ARVRVYCSSTSCYEVWFDP

SEQ ID NO: 1105 - protein, 19 aa, Artificial Sequence
  Synthetic peptide
ARGPPDIVVVPAARNWFDP

SEQ ID NO: 1106 - protein, 19 aa, Artificial Sequence
  Synthetic peptide
ATAPPYYYGSGSYYNWFDP

SEQ ID NO: 1107 - protein, 19 aa, Artificial Sequence
  Synthetic peptide
ARGGGNMVRGVIMYNWFDP

SEQ ID NO: 1108 - protein, 19 aa, Artificial Sequence
  Synthetic peptide
ARSGYYDSSGYYYVGDFDY

SEQ ID NO: 1109 - protein, 19 aa, Artificial Sequence
  Synthetic peptide
ARDRVIAAAGGYYYYGMDV

SEQ ID NO: 1110 - protein, 19 aa, Artificial Sequence
  Synthetic peptide
ARDLGYCSSTSCYGDWFDP

SEQ ID NO: 1111 - protein, 19 aa, Artificial Sequence
  Synthetic peptide
ARDARIAAAGTTYYYGMDV

SEQ ID NO: 1112 - protein, 19 aa, Artificial Sequence
  Synthetic peptide
AKDYYDSSGRGFYYYGMDV

SEQ ID NO: 1113 - protein, 19 aa, Artificial Sequence
  Synthetic peptide
ARDQGAAAADYYYYYGMDV

SEQ ID NO: 1114 - protein, 19 aa, Artificial Sequence
  Synthetic peptide
AKGSYCSGGSCIYYYGMDV

SEQ ID NO: 1115 - protein, 19 aa, Artificial Sequence
  Synthetic peptide
ARGGLYCSSTSCYVNWFDP

SEQ ID NO: 1116 - protein, 19 aa, Artificial Sequence
  Synthetic peptide
AKDVYGSGSYYYYYYGMDV

SEQ ID NO: 1117 - protein, 19 aa, Artificial Sequence
  Synthetic peptide
ARRALGYCSSTSCQEAFDI

SEQ ID NO: 1118 - protein, 19 aa, Artificial Sequence
  Synthetic peptide
ARDTTVTTSGNYYYYGMDV

SEQ ID NO: 1119 - protein, 19 aa, Artificial Sequence
  Synthetic peptide
ARWRYSSSWYTPPKYYFDY

SEQ ID NO: 1120 - protein, 19 aa, Artificial Sequence
  Synthetic peptide
ARGIGGYSYGYFYYYGMDV

SEQ ID NO: 1121 - protein, 19 aa, Artificial Sequence
  Synthetic peptide
ARIPVLRYFDWLLLGWFDP

SEQ ID NO: 1122 - protein, 19 aa, Artificial Sequence
  Synthetic peptide
ARDLGTTGTHYYYYYGMDV

SEQ ID NO: 1123 - protein, 19 aa, Artificial Sequence
  Synthetic peptide
AREGLYCSGGSCYYYGMDV

SEQ ID NO: 1124 - protein, 19 aa, Artificial Sequence
  Synthetic peptide
ARDLVAAAGSNYYYYGMDV

SEQ ID NO: 1125 - protein, 19 aa, Artificial Sequence
  Synthetic peptide
ARGGRYSSSWYGERYYFDY

SEQ ID NO: 1126 - protein, 19 aa, Artificial Sequence
  Synthetic peptide
ARGGWSAADRYYYYYYMDV

SEQ ID NO: 1127 - protein, 19 aa, Artificial Sequence
  Synthetic peptide
ARGGWTTVTPLYYYYGMDV

SEQ ID NO: 1128 - protein, 20 aa, Artificial Sequence
  Synthetic peptide
ARDGTYYYDSSGYYSDAFDI

SEQ ID NO: 1129 - protein, 20 aa, Artificial Sequence
  Synthetic peptide
AREGGLRYFDLDYYYYGMDV

SEQ ID NO: 1130 - protein, 20 aa, Artificial Sequence
  Synthetic peptide
ARGVIAVAGLIEYYYYGMDV

SEQ ID NO: 1131 - protein, 20 aa, Artificial Sequence
  Synthetic peptide
ARGGVHYYDSSGYYNDAFDI

SEQ ID NO: 1132 - protein, 20 aa, Artificial Sequence
  Synthetic peptide
AKVQGPYCSGGSCYSGAFDY

SEQ ID NO: 1133 - protein, 20 aa, Artificial Sequence
  Synthetic peptide
ARGGEVRYFDWSYYYYGMDV

SEQ ID NO: 1134 - protein, 20 aa, Artificial Sequence
  Synthetic peptide
ARMNVLRYFDWLSHYYGMDV

SEQ ID NO: 1135 - protein, 20 aa, Artificial Sequence
  Synthetic peptide
ARDGRVLEWLLNYYYYYMDV

SEQ ID NO: 1136 - protein, 20 aa, Artificial Sequence
  Synthetic peptide
AKDGLHYYDSSGYYTDAFDL

SEQ ID NO: 1137 - protein, 20 aa, Artificial Sequence
  Synthetic peptide
ARGTMVRGVITYYYYYYMDV

SEQ ID NO: 1138 - protein, 20 aa, Artificial Sequence
  Synthetic peptide
ARETYYYDSSGYYQSNAFDI

SEQ ID NO: 1139 - protein, 20 aa, Artificial Sequence
  Synthetic peptide
TTDLSGVYYDILTGYYRIDY

SEQ ID NO: 1140 - protein, 20 aa, Artificial Sequence
  Synthetic peptide
ARLVVDTAMVGEYYYYGMDV

SEQ ID NO: 1141 - protein, 20 aa, Artificial Sequence
  Synthetic peptide
ARAGVLRYFDYYYYYYGMDV

SEQ ID NO: 1142 - protein, 20 aa, Artificial Sequence
  Synthetic peptide
ARDIVVVPAATYYYYYGMDV

SEQ ID NO: 1143 - protein, 20 aa, Artificial Sequence
  Synthetic peptide
ARDSVLRYFDWSYYYYGMDV

SEQ ID NO: 1144 - protein, 20 aa, Artificial Sequence
  Synthetic peptide
AKGGGLYCSGGSCYSNYFDY

SEQ ID NO: 1145 - protein, 20 aa, Artificial Sequence
  Synthetic peptide
ATAPAVAGTPGNYYYYGMDV

SEQ ID NO: 1146 - protein, 20 aa, Artificial Sequence
  Synthetic peptide
ARDRYTYYYDSSGYYNWFDP

SEQ ID NO: 1147 - protein, 20 aa, Artificial Sequence
  Synthetic peptide
ARVGYYYDSSGYPSYWYFDL

SEQ ID NO: 1148 - protein, 20 aa, Artificial Sequence
  Synthetic peptide
ARGLVGSSSWYDYYYYGMDV

SEQ ID NO: 1149 - protein, 20 aa, Artificial Sequence
  Synthetic peptide
ARAIVVVPAAHVYYYYGMDV

SEQ ID NO: 1150 - protein, 20 aa, Artificial Sequence
  Synthetic peptide
AKVRYCSSTSCYGYYYGIDV

SEQ ID NO: 1151 - protein, 20 aa, Artificial Sequence
  Synthetic peptide
ARGFPSSSWYHGYYYYGMDV

SEQ ID NO: 1152 - protein, 20 aa, Artificial Sequence
  Synthetic peptide
ARDAWAAAGTQYYYYYGMDV

SEQ ID NO: 1153 - protein, 20 aa, Artificial Sequence
  Synthetic peptide
ASSHVLRYFDWLLSGGWFDP

SEQ ID NO: 1154 - protein, 20 aa, Artificial Sequence
  Synthetic peptide
ARDRGYDYVWGSYRPYYFDY

SEQ ID NO: 1155 - protein, 20 aa, Artificial Sequence
  Synthetic peptide
ARAGLFYYDSSGYYNDAFDI

SEQ ID NO: 1156 - protein, 20 aa, Artificial Sequence
  Synthetic peptide
ARGLVGAYCGGDCYDNWFDP

SEQ ID NO: 1157 - protein, 20 aa, Artificial Sequence
  Synthetic peptide
ARLGILRYFDWLSNYYGMDV

SEQ ID NO: 1158 - protein, 20 aa, Artificial Sequence
  Synthetic peptide
AKVRGRYCSGGSCYSGQFDY

SEQ ID NO: 1159 - protein, 20 aa, Artificial Sequence
  Synthetic peptide
ARDRRIAAAGTSYYYYGMDV

SEQ ID NO: 1160 - protein, 20 aa, Artificial Sequence
  Synthetic peptide
ARDQELRYFDWLYYYYGMDV

SEQ ID NO: 1161 - protein, 20 aa, Artificial Sequence
  Synthetic peptide
ARGSPCGGDCSIYYYYGMDV

SEQ ID NO: 1162 - protein, 20 aa, Artificial Sequence
  Synthetic peptide
ARDLADDILTGYYYYYGMDV

SEQ ID NO: 1163 - protein, 20 aa, Artificial Sequence
  Synthetic peptide
ARELVLRYFDWTYYYYGMDV

SEQ ID NO: 1164 - protein, 21 aa, Artificial Sequence
  Synthetic peptide
ARGIVVVVAATPGYYYYGMDV

SEQ ID NO: 1165 - protein, 21 aa, Artificial Sequence
  Synthetic peptide
ATGFVVRGVITQYYYYYGMDV

SEQ ID NO: 1166 - protein, 21 aa, Artificial Sequence
  Synthetic peptide
ARGRIWFGEFLGNYYYYGMDV

SEQ ID NO: 1167 - protein, 21 aa, Artificial Sequence
  Synthetic peptide
ARAIVVVPAANTNYYYYGMDV

SEQ ID NO: 1168 - protein, 21 aa, Artificial Sequence
  Synthetic peptide
ARAEYSSSWYLGDYYYYGMDV

SEQ ID NO: 1169 - protein, 21 aa, Artificial Sequence
  Synthetic peptide
ARDMYCSSTSCSAVYYYGMDV

SEQ ID NO: 1170 - protein, 21 aa, Artificial Sequence
  Synthetic peptide
ARGFYCSGGSCRIYYYYGMDV

SEQ ID NO: 1171 - protein, 21 aa, Artificial Sequence
  Synthetic peptide
AKEGGGGYCSGGSCYSSYFDY

SEQ ID NO: 1172 - protein, 21 aa, Artificial Sequence
  Synthetic peptide
ARAGATYYYDSSGYYPDAFDI

SEQ ID NO: 1173 - protein, 21 aa, Artificial Sequence
  Synthetic peptide
ARGGYCSGGSCYSYYYYGMDV

SEQ ID NO: 1174 - protein, 21 aa, Artificial Sequence
  Synthetic peptide
ARDGDCSGGSCYSSYYYGMDV

SEQ ID NO: 1175 - protein, 22 aa, Artificial Sequence
  Synthetic peptide
ARGIVVVPAAMQLYYYYYGMDV

SEQ ID NO: 1176 - protein, 22 aa, Artificial Sequence
  Synthetic peptide
ARDHKTYYYDSSGYYYEYYFDY

SEQ ID NO: 1177 - protein, 22 aa, Artificial Sequence
  Synthetic peptide
ARLGYCSSTSCYAPYYYYGMDV

SEQ ID NO: 1178 - protein, 22 aa, Artificial Sequence
  Synthetic peptide
ARDLDIVVVPAAIRYYYYGMDV

SEQ ID NO: 1179 - protein, 22 aa, Artificial Sequence
  Synthetic peptide
ARGLVVVPAAEGDYYYYYGMDV

SEQ ID NO: 1180 - protein, 22 aa, Artificial Sequence
  Synthetic peptide
ARGLRVVVVAATPRYYYYGMDV

SEQ ID NO: 1181 - protein, 22 aa, Artificial Sequence
  Synthetic peptide
ARDLIVVVVAATPFYYYYGMDV

SEQ ID NO: 1182 - protein, 22 aa, Artificial Sequence
  Synthetic peptide
ARDIVVVPAAMRDYYYYYGMDV

SEQ ID NO: 1183 - protein, 22 aa, Artificial Sequence
  Synthetic peptide
ARGAVVVPAARRDYYYYYGMDV

SEQ ID NO: 1184 - protein, 22 aa, Artificial Sequence
  Synthetic peptide
ARGPVVVPAAIGVNYYYYGMDV

SEQ ID NO: 1185 - protein, 22 aa, Artificial Sequence
  Synthetic peptide
ARSVVVVPAAIRAYYYYYGMDV

SEQ ID NO: 1186 - protein, 22 aa, Artificial Sequence
  Synthetic peptide
ARGHIVVVTATSNYYYYYGMDV

SEQ ID NO: 1187 - protein, 22 aa, Artificial Sequence
  Synthetic peptide
ARGIVVVVAATNPSYYYYGMDV

SEQ ID NO: 1188 - protein, 22 aa, Artificial Sequence
  Synthetic peptide
ARGANIVVVPAAISYYYYGMDV

SEQ ID NO: 1189 - protein, 23 aa, Artificial Sequence
  Synthetic peptide
ARQYYYDSSGYYLGLYYYYGMDV

SEQ ID NO: 1190 - protein, 23 aa, Artificial Sequence
  Synthetic peptide
ARDPVITFGGVIVTDYYYYYMDV

SEQ ID NO: 1191 - protein, 24 aa, Artificial Sequence
  Synthetic peptide
ARDATYYDILTGYYPQYYYYGMDV

SEQ ID NO: 1192 - protein, 24 aa, Artificial Sequence
  Synthetic peptide
ARDKYYYDSSGYYQDYYYYYGMDV

SEQ ID NO: 1193 - protein, 24 aa, Artificial Sequence
  Synthetic peptide
ARGYYYDSSGYYYSPYYYYYGMDV

SEQ ID NO: 1194 - protein, 25 aa, Artificial Sequence
  Synthetic peptide
ARGTYYYDSSGYYYPPYYYYYGMDV

SEQ ID NO: 1195 - protein, 25 aa, Artificial Sequence
  Synthetic peptide
ARDFPYYYDSSGYYYGYYYYYGMDV

SEQ ID NO: 1196 - protein, 11 aa, Artificial Sequence
  Synthetic peptide
WGQGTTVTVSS

SEQ ID NO: 1197 - protein, 11 aa, Artificial Sequence
  Synthetic peptide
WGQGTLVTVSS

SEQ ID NO: 1198 - protein, 11 aa, Artificial Sequence
  Synthetic peptide
WGQGTMVTVSS

SEQ ID NO: 1199 - protein, 11 aa, Artificial Sequence
  Synthetic peptide
WGPGTLVTVSS

SEQ ID NO: 1200 - protein, 11 aa, Artificial Sequence
  Synthetic peptide
WGKGTTVTVSS

SEQ ID NO: 1201 - protein, 11 aa, Artificial Sequence
  Synthetic peptide
WGQGSLVTVSS

SEQ ID NO: 1202 - protein, 10 aa, Artificial Sequence
  Synthetic peptide
WGQGTLVTVS

SEQ ID NO: 1203 - protein, 11 aa, Artificial Sequence
  Synthetic peptide
WGRGTLVTVSS

SEQ ID NO: 1204 - protein, 11 aa, Artificial Sequence
  Synthetic peptide
WGHGTAVTVSS

SEQ ID NO: 1205 - protein, 11 aa, Artificial Sequence
  Synthetic peptide
WGQGTKVTVSS

SEQ ID NO: 1206 - protein, 11 aa, Artificial Sequence
  Synthetic peptide
WGKGTTVTISS

SEQ ID NO: 1207 - protein, 11 aa, Artificial Sequence
  Synthetic peptide
WGQGILVSVSS

SEQ ID NO: 1208 - protein, 11 aa, Artificial Sequence
  Synthetic peptide
GGQGTTVTVSS

SEQ ID NO: 1209 - protein, 10 aa, Artificial Sequence
  Synthetic peptide
WGQGTTVTVS

SEQ ID NO: 1210 - protein, 11 aa, Artificial Sequence
  Synthetic peptide
WGQGALVTVSS

SEQ ID NO: 1211 - protein, 11 aa, Artificial Sequence
  Synthetic peptide
WGQGTVVTVSS

SEQ ID NO: 1212 - protein, 11 aa, Artificial Sequence
  Synthetic peptide
WGEGTTVTVSS

SEQ ID NO: 1213 - protein, 11 aa, Artificial Sequence
  Synthetic peptide
WGQGTLLTVSS

SEQ ID NO: 1214 - protein, 11 aa, Artificial Sequence
  Synthetic peptide
WGQGTLVTVAS

SEQ ID NO: 1215 - protein, 11 aa, Artificial Sequence
  Synthetic peptide
WGQGTWVTVSS

SEQ ID NO: 1216 - protein, 11 aa, Artificial Sequence
  Synthetic peptide
WGQGAQVSVSS

SEQ ID NO: 1217 - protein, 11 aa, Artificial Sequence
  Synthetic peptide
WVRGSTGTVSS

SEQ ID NO: 1218 - protein, 11 aa, Artificial Sequence
  Synthetic peptide
WGQGSTVTVSS

SEQ ID NO: 1219 - protein, 117 aa, Artificial Sequence
  Synthetic polypeptide
QVQLVESGGGVVQPGRSLRLSCAASGFTFSSYGMHWVRQAPGKGLEWVAVISYDGSNKYYADSVKGRFTISRDNSKNTLYLQMNSLRAEDAVYYCARDRSSWYLDYWGQGTLVTVSS

SEQ ID NO: 1220 - protein, 119 aa, Artificial Sequence
  Synthetic polypeptide
QVQLQESGPGLVKPSETLSLTCSVSGGSISGYYWSWIRQAPGKGLEWIAFIDESGSTNSKSSLQSRVSISVDTSKNQISLKLSSVTAADAVYHCARGVAVAGTWWFDPWGQGTLVTVSS

SEQ ID NO: 1221 - protein, 123 aa, Artificial Sequence
  Synthetic polypeptide
QVQLVESGGGVVQPGRSLRLSCAASGFTFSSYGMHWVRQAPGKGLEWVAVIWYDGSNKYYADSVKGRFTISRDNSKNTLYLQMNSLRAEDAVYYCAKDRGIAVAGTLYYFDYWGQGTLVTVSS

SEQ ID NO: 1222 - protein, 124 aa, Artificial Sequence
  Synthetic polypeptide
QVQLVQSGAEVKKPGSSVKVSCKASGDNFNSFAFNWVRQAPGQGLEWIGGIMPLFGTTNYAQKFQGRVTITADESTSTAYMDLRRLRSEDAVYFCARSRDIVVEPTDRDPCDIWGQGTLVTVSS

SEQ ID NO: 1223 - protein, 113 aa, Artificial Sequence
  Synthetic polypeptide
EVQLVESGGGLVQPGGSLKLSCAASGFTFSGSAMHWVRQASGKGLEWVGRIRSKANSYATAYAASVKGRFTISRDDSKNTAYLQMNSLKTEDAVYYCTRLDVWGQGTTVTVSS

SEQ ID NO: 1224 - protein, 111 aa, Artificial Sequence
  Synthetic polypeptide
EVQLVESGGGLVQPGGSLRLSCAASGFTFSSYWMHWVRQAPGKGLVWVSRINSDGSSTSYADSVKGRFTISRDNAKNTLYLQMNSLRAEDAVYYCARPPYWGQGTLVTVSS

SEQ ID NO: 1225 - protein, 113 aa, Artificial Sequence
  Synthetic polypeptide
EVQLVESGGGLVQPGGSLKLSCAASGFTFSGSAMHWVRQASGKGLEWVGRIRSKANSYATAYAASVKGRFTISRDDSKNTAYLQMNSLKTEDAVYYCTRHDVWGQGTLVTVSS

SEQ ID NO: 1226 - protein, 113 aa, Artificial Sequence
  Synthetic polypeptide
EVQLVESGGGLVQPGGSLKLSCAASGFTFSGSAMHWVRQASGKGLEWVGRIRSKANSYATAYAASVKGRFTISRDDSKNTAYLQMNSLKTEDAVYYCTRLDIWGQGTMVTVSS

SEQ ID NO: 1227 - protein, 114 aa, Artificial Sequence
  Synthetic polypeptide
EVQLVESGGGLVKPGGSLRLSCAASGFTFSNAWMSWVRQAPGKGLEWVGRIKSKTDGGTTDYAAPVKGRFTISRDDSKNTLYLQMNSLKTEDAVYYCTTRGGYWGQGTLVTVSS

SEQ ID NO: 1228 - protein, 112 aa, Artificial Sequence
  Synthetic polypeptide
QVQLVESGGGVVQPGRSLRLSCAASGFTYSNFAMHWVRQAPGKGLEWVALISYDGGLKYYADSVKGRFTISRDNSKNTLYLQMNSLRPEDALYYCARVFDYWGQGTLVTVSS

SEQ ID NO: 1229 - protein, 113 aa, Artificial Sequence
  Synthetic polypeptide
QVQLQESGPGLVKPSQTLSLTCTVSGASFSSGTYYWTWVRQAAGKGLEWIGRLHTRGRTDFNPSLKSRVTMSIDTSKNHFSLRLDSVTAADAVYYCARGFDHWGPGTLVTVSS

SEQ ID NO: 1230 - protein, 111 aa, Artificial Sequence
  Synthetic polypeptide
QVQLQESGPGLVKPSETLSLTCTVSGGSISSYYWSWIRQPPGKGLEWIGYIYYSGSTNYNPSLKSRVTISVDTSKNQFSLKLSSVTAADAVYYCARGFTDWGQGTLVTVSS

SEQ ID NO: 1231 - protein, 114 aa, Artificial Sequence
  Synthetic polypeptide
EVQLVESGGGLVKPGGSLRLSCAASGFPFSNAWMSWVRQAPGKGLEWVGRIKSKTDGGTIDYAAPVKGRFTISRDDSKNTLYLYMNSLKTEDAVYYCTTGGRLWGQGTLVTVSS

SEQ ID NO: 1232 - protein, 111 aa, Artificial Sequence
  Synthetic polypeptide
QVQLQESGPGLVKPSETLSLTCTVPGGSISSYYWTWIRQSPGKGLDWIGYIYYSGSTNYNPSLTSRVTRSVDTSKNQFSLKLSAVTAPDAVYYCAGGCDYWGQGTLVTVSS

SEQ ID NO: 1233 - protein, 113 aa, Artificial Sequence
  Synthetic polypeptide
QLQLQESGPGLVKPSETLSLTCTVSGNSISRTSYYWGWIRQPPGKGLEWIGSVFYSGRTYYNPSLKSRATISLDTSKNQFSLKLSSVSAADAVYYCARLVDYWGQGTLVTVSS

SEQ ID NO: 1234 - protein, 112 aa, Artificial Sequence
  Synthetic polypeptide
EVQLLESGGGLVQPGGSLRLSCAASGFTFSRYDMSWVRQAPGKGLEWVSAISTSGVNTYYADSVKGRFTISRDNSKNTLYLQMNSLRAEDAVYYCARGIDYWGQGTLVTVSS

SEQ ID NO: 1235 - protein, 112 aa, Artificial Sequence
  Synthetic polypeptide
EVQLVQSGAEVKKPGESLKISCKAPGYSFTTSWIAWVRQMPGKGLEWMGIIYPGDSDTRYSPSFQGQVTISADNSISTAYLQWSSLRASDAMYYCASQFDYWGQGTLVTVSS

SEQ ID NO: 1236 - protein, 114 aa, Artificial Sequence
  Synthetic polypeptide
EVQLVESGGGLVKPGGSLRLSCAASGFTFSNAWMSWVRQAPGKGLEWVGRIKSKTDGGTTDYAAPVKGRFTISRDDSKNTLYLQMNSLKTEDAVYYCTAGGRVWGKGTTVTVSS

SEQ ID NO: 1237 - protein, 112 aa, Artificial Sequence
  Synthetic polypeptide
QVQLVQSGAEVKKPGASVKVSCKASGYTFTDYYMHWVRQAPGQGLEWMGWINPNSGGTNYAQKFQGRVTMARDTSISTAYMEVSSLRSDDAVYYCARDADYWGQGTLVTVSS

SEQ ID NO: 1238 - protein, 111 aa, Artificial Sequence
  Synthetic polypeptide
QVQLQQWGAGLLKPSETLSLTCAVYGGSFSNIYWTWIRQPPEKGLEWIGEINHTGSTNYNPSLKSRITISADTSKNQFSLKLSSVTAADAVYYCARGFDPWGQGTLVTVSS

SEQ ID NO: 1239 - protein, 112 aa, Artificial Sequence
  Synthetic polypeptide
QVQLQQWGAGLLKPSETLSLTCAVYGGSFSGYQWSWVRQSPGKGLEWIGQINHTGSTKYNPSLQSRVTLSVDTSKNQFSLKLRSMTAADAVYYCTRGVPGYWGQGSLVTVSS

SEQ ID NO: 1240 - protein, 112 aa, Artificial Sequence
  Synthetic polypeptide
QVQLQESGPGLVKPSETLSLTCTVSGGSISSYYWSWIRQPPGKGLEWIGYIYYSGSTNYNPSLKSRVTISVDTSKNQFSLKLTSVTAADAVYYCARGFGDYWGQGTLVTVSS

SEQ ID NO: 1241 - protein, 112 aa, Artificial Sequence
  Synthetic polypeptide
QVQLQESGPGLVKPSETLSLTCTVSGGSISSYYWSWIRQPPGKGLEWIGYIYYSGSTNYNPSLKSRVTISVDTSKNQFSLKLSSVTAADAVYYCARDLGLDWGQGTLVTVSS

SEQ ID NO: 1242 - protein, 114 aa, Artificial Sequence
  Synthetic polypeptide
QVQLQESGPGLVKPSGTLSLTCAVSGGSISSSNWWSWVRQPPGKGLEWIGEIYHSGSTNYNPSLKSRVTISVDKSKNQFSLKLSSVTAADAVYYCARGWYFDYWGQGTLVTVSS

SEQ ID NO: 1243 - protein, 113 aa, Artificial Sequence
  Synthetic polypeptide
QVQLVQSGAEVKKPGASVKVSCKASGYSFTSFGITWVRQAPGQGLEWMGYISAHNGNSKATQQLQDRVTMTTDTSTSTAYLELRNLRPDDAVYYCARGSAIDYWGQGTLVTVS

SEQ ID NO: 1244 - protein, 114 aa, Artificial Sequence
  Synthetic polypeptide
QVQLVQSGAEVKKPGASVKVSCKASGYTFTSYDISWVRQATGQGLQWMGWMNPNSGNTGYAQKFQGRVTMTRNSSISTAYMELSSLRSEDAVYYCARGVYFDPWGQGTLVTVSS

SEQ ID NO: 1245 - protein, 116 aa, Artificial Sequence
  Synthetic polypeptide
EVQLVESGGGLVQPGGSLKLSCAASGFTFSGSAMHWVRQASGKGLEWVGRIRSKANSYATAYAASVKGRFTISRDDSKNTAYLQMNSLKTEDAVYYCTRHGDFVDWGQGTLVTVSS

SEQ ID NO: 1246 - protein, 114 aa, Artificial Sequence
  Synthetic polypeptide
QVQLQESGPGLVKPSGTLSLTCAVSGGSISSSNWWSWVRQPPGKGLEWIGEIYHSGSTNYNPSLKSRVTISVDKSKNQFSLKLSSVTAADAVYYCARGWWFDPWGQGTLVTVSS

SEQ ID NO: 1247 - protein, 114 aa, Artificial Sequence
  Synthetic polypeptide
QVQLVESGGGVVQPGRSLRLSCAASGFTFSSYGMHWVRQAPGKGLEWVAVIWYDGSNKYYADSVKGRFTISRDNSKNTLYLQMNSLRAEDAVYYCARGVEADYWGQGTLVTVSS

SEQ ID NO: 1248 - protein, 114 aa, Artificial Sequence
  Synthetic polypeptide
EVQLVESGGGLVQPGGSLRLSCAASGFTFSSYSMNWVRQAPGKGLEWVSYISSSSSTIYYADSVKGRFTISRDNAKNSLYLQMNSLRDEDAVYYCASIVWPDYWGQGTLVTVSS

SEQ ID NO: 1249 - protein, 113 aa, Artificial Sequence
  Synthetic polypeptide
EVQLVESGGGLVQPGGSLRLSCAASGFTVSSNYMSWVRQAPGKGLEWVSVIYSGGSTYYADSVKGRFTISRDNSKNTLYLQMNSLRAEDAVYYCARDVRDVYWGQGTLVTVSS

SEQ ID NO: 1250 - protein, 114 aa, Artificial Sequence
  Synthetic polypeptide
EVQLVESGGGLVQPGGSLRLSCAASGFVFSDYWMHWVRQTPGKGLVWVSCINIDGSGITYADSVKGRFTISRDNAKKTLYLQMNSLSVEDAVYYCAATNWFDPWGQGTLVTVSS

SEQ ID NO: 1251 - protein, 115 aa, Artificial Sequence
  Synthetic polypeptide
EVQLVQSGAEVKKPGESLKISCKGSGYSFTSYWIGWVRQMPGKGLEWMGIIYPGDSDTRYSPSFQGQVTISADKSISTAYLQWSSLKASDAMYYCARLEMLPDYWGQGTLVTVSS

SEQ ID NO: 1252 - protein, 115 aa, Artificial Sequence
  Synthetic polypeptide
QVQLVESGGGVVQPGRSLRLSCAASGFTFSSYGMHWVRQAPGKGLEWVAVIWYDGSNKYYADSVKGRFTISRDNSKNTLYLQMNSLRAEDAVYYCAKGAHGMDVWGQGTTVTVSS

SEQ ID NO: 1253 - protein, 115 aa, Artificial Sequence
  Synthetic polypeptide
EVQLVESGGGLVQPGRSLRLSCAASGFTFDDYSMHWVRQAPGKGLEWVSGISWNSGSINYADSVKGRFTISRDNAKNSLFLQMNSLRPEDALYYCAKFGGVFDYWGQGTLVTVSS

SEQ ID NO: 1254 - protein, 115 aa, Artificial Sequence
  Synthetic polypeptide
EVQLVQSGAEVKKPGESLKISCKGSGYSFTNYWIGWVRQMPGKGLEWMGIIYPGDSDARYSPSFQGQVTLSADKSISTAYLQWSSLKASDAIYYCARSFSAFDIWGQGTMVTVSS

SEQ ID NO: 1255 - protein, 115 aa, Artificial Sequence
  Synthetic polypeptide
QVQLVESGGGVVQPGRSLRLSCAASGFTFSSYAMHWVRQAPGKGLEWVAVISYDGSNKYYADSVKGRFTISRDNSKNTLYLQMNSLRAEDAVYYCRGELLGVDYWGQGTLVTVSS

SEQ ID NO: 1256 - protein, 115 aa, Artificial Sequence
  Synthetic polypeptide
EVQLVESGGGLVQPGGSLRLSCEASGFRFSSYWMHWVRQTPEKGLVWVSHIDSDGGRPSYADSVKGRFTISRDNAKNTLYLQMNSLRVEDAVYYCASLSAPSDYWGQGTLVTVSS

SEQ ID NO: 1257 - protein, 115 aa, Artificial Sequence
  Synthetic polypeptide
QVQLVESGGGLVKPGGSLRLSCAASGFTFSDYYMCWIRQAPGKRLEYISYISGSGSVTSYADSVKGRFTISRDNAKNSLYLQMNSLRAEDAVYYCARTARVLESWGQGTLVTVSS

SEQ ID NO: 1258 - protein, 114 aa, Artificial Sequence
  Synthetic polypeptide
EVQLVESGGGLVQPGGSLRLSCAASGFTVSSNYMSWVRQAPGKGLEWVSVIYSGGSTYYADSVKGRFTISRDNSKNTLYLQMNSLRAEDAVYYCARDLEYFDYWGQGTLVTVSS

SEQ ID NO: 1259 - protein, 115 aa, Artificial Sequence
  Synthetic polypeptide
EVQLVQSGAEVKKPGESLKISCKGSGYSFTSYWIGWVRQMPGKGLEWMGIIYPGDSDTRYSPSFQGQVTISADKSISTAYLQWSSLKASDAMYYCATYGGAFDIWGQGTMVTVSS

SEQ ID NO: 1260 - protein, 116 aa, Artificial Sequence
  Synthetic polypeptide
QVQLVESGGGVVQPGRSLRLSCAASGFTFSSYGMHWVRQAPGKGLEWVAVIWYDGSNKYYADSVKGRFTISRDNSKNTLYLQMNSLRAEDAVYYCARGREWELGYWGQGTLVTVSS

SEQ ID NO: 1261 - protein, 116 aa, Artificial Sequence
  Synthetic polypeptide
QVQLVESGGGVVQPGRSLRLSCAASGFTFSSYAMHWVRQAPGKGLEWVAVISYDGSNKYYADSVKGRFTISRDNSKNTLYLQMNSLRAEDAVYYCARDGGGILGYWGQGTLVTVSS

SEQ ID NO: 1262 - protein, 116 aa, Artificial Sequence
  Synthetic polypeptide
QVQLVESGGGVVQPGRSLRLSCAASGFTFSSYAMHWVRQAPGKGLEWVAVISYDGSNKYYADSVKGRFTISRDNSKNTLYLQMNSLRAEDAVYYCAGELLFAFDYWGQGTLVTVSS

SEQ ID NO: 1263 - protein, 116 aa, Artificial Sequence
  Synthetic polypeptide
QVQLVESGGGVVQPGRSLRLSCAASGFTFSSYAMHWVRQAPGKGLEWVAVISYDGSNKYYADSVKGRFTISRDNSKNTLYLQMNSLRAEDAVYYCARDSGGLIDYWGQGTLVTVSS

SEQ ID NO: 1264 - protein, 116 aa, Artificial Sequence
  Synthetic polypeptide
QVQLVESGGGVVQPGRSLRLSCAASGFTFSSYAMHWVRQAPGKGLEWVAVISYDGSNKYYADSVKGRFTISRDNSKNTLYLQMNSLRAEDAVYYCARDLGSMFDPWGQGTLVTVSS

SEQ ID NO: 1265 - protein, 116 aa, Artificial Sequence
  Synthetic polypeptide
QVQLVESGGGVVQPGRSLRLSCAASGFTFSSYGMHWVRQAPGKGLEWVAVIWYDGSNKYYADSVKGRFTISRDNSKNTLYLQMNSLRAEDAVYYCARALDWYFDLWGRGTLVTVSS

SEQ ID NO: 1266 - protein, 116 aa, Artificial Sequence
  Synthetic polypeptide
QVQLVESGGGVVQPGRSLRLSCAASGFTFSSYAMHWVRQAPGKGLEWVAVISYDGSNKYYADSVKGRFTISRDNSKNTLYLQMNSLRAEDAVYYCASGLLLEFDYWGQGTLVTVSS

SEQ ID NO: 1267 - protein, 116 aa, Artificial Sequence
  Synthetic polypeptide
QVQLVESGGGVVQPGRSLRLSCAASGFTFSSYGMHWVRQAPGKGLEWVAVIWYDGSNKYYADSVKGRFTISRDNSKNTLYLQMNSLRAEDAVYYCAREVMVYLDYWGQGTLVTVSS

SEQ ID NO: 1268 - protein, 116 aa, Artificial Sequence
  Synthetic polypeptide
QVQLVESGGGVVQPGRSLRLSCAASGFTFSSYAMHWVRQAPGKGLEWVAVISYDGSNKYYADSVKGRFTISRDNSKNTLYLQMNSLRAEDAVYYCARDWGSGMDVWGQGTTVTVSS

SEQ ID NO: 1269 - protein, 116 aa, Artificial Sequence
  Synthetic polypeptide
QVQLVESGGGVVQPGRSLRLSCAASGFTFSSYAMHWVRQAPGKGLEWVAVISYDGSNKYYADSVKGRFTISRDNSKNTLYLQMNSLRAEDAVYYCARDSGSAFDIWGQGTMVTVSS

SEQ ID NO: 1270 - protein, 115 aa, Artificial Sequence
  Synthetic polypeptide
EVQLVESGGGLIQPGGSLRLSCAASGFTVSSNYMSWVRQAPGKGLEWVSVIYSGGSTYYADSVKGRFTISRDNSKNTLYLQMNSLRAEDAVYYCARDLGGYFDYWGQGTLVTVSS

SEQ ID NO: 1271 - protein, 116 aa, Artificial Sequence
  Synthetic polypeptide
QVQLVESGGGVVQPGRSLRLSCAASGFTFSSYGMHWVRQAPGKGLEWVAVIWYDGSNKYYADSVKGRFTISRDNSKNTLYLQMNSLRAEDAVYYCAREEIVVLDYWGQGTLVTVSS

SEQ ID NO: 1272 - protein, 116 aa, Artificial Sequence
  Synthetic polypeptide
QVQLVESGGGVVQPGRSLRLSCAASGFTFSSYAMHWVRQAPGKGLEWVAVISYDGSNKYYADSVKGRFTISRDNSKNTLYLQMNSLRAEDAVYYCAGELVAGLDYWGQGTLVTVSS

SEQ ID NO: 1273 - protein, 115 aa, Artificial Sequence
  Synthetic polypeptide
QVQLQQWGAGLLKPSETLSLTCAVYGGSFSGYYWSWIRQPPGKGLEWIGEINHSGSTNYNPSLKSRVTISVDTSKNQFSLKLSSVTAADAVYYCARAFYDSSGYWGQGTLVTVSS

SEQ ID NO: 1274 - protein, 116 aa, Artificial Sequence
  Synthetic polypeptide
QVQLVESGGGVVQPGRSLRLSCAASGFTFSSYAMHWVRQAPGKGLEWVAVISYDGSNKYYADSVKGRFTISRDNSKNTLYLQMNSLRAEDAVYYCASQLVDAFDIWGQGTMVTVSS

SEQ ID NO: 1275 - protein, 116 aa, Artificial Sequence
  Synthetic polypeptide
QVQLVESGGGVVQPGRSLRLSCAASGFTFSSYAMHWVRQAPGKGLEWVAVISYDGSNKYYADSVKGRFTISRDNSKNTLYLQMNSLRAEDAVYYCAGELLSWFDPWGQGTLVTVSS

SEQ ID NO: 1276 - protein, 117 aa, Artificial Sequence
  Synthetic polypeptide
QLQLQESGSGLVKPSQTLSLTCAVSGGSISSGGYSWSWIRQPPGKGLEWIGYIYHSGSTYYNPSLKSRVTISVDRSKNQFSLKLSSVTAADAVYYCARGATYYYDYWGQGTLVTVSS

SEQ ID NO: 1277 - protein, 116 aa, Artificial Sequence
  Synthetic polypeptide
QVQLVESGGGVVQPGRSLRLSCAASGFTFSSYAMHWVRQAPGKGLEWVAVISYDGSNKYYADSVKGRFTISRDNSKNTLYLQMNSLRAEDAVYYCARPPGHYFDYWGQGTLVTVSS

SEQ ID NO: 1278 - protein, 116 aa, Artificial Sequence
  Synthetic polypeptide
QVQLVESGGGVVQPGRSLRLSCAASGFTFSSYGMHWVRQAPGKGLEWVAVIWYDGSNKYYADSVKGRFTISRDNSKNTLYLQMNSLRAEDAVYYCARGSGWYIDYWGQGTLVTVSS

SEQ ID NO: 1279 - protein, 116 aa, Artificial Sequence
  Synthetic polypeptide
QVQLVESGGGVVQPGRSLRLSCAASGFTFSSYGMHWVRQAPGKGLEWVAVIWYDGSNKYYADSVKGRFTISRDNSKNTLYLQMNSLRAEDAVYYCASSLLLAFDYWGQGTLVTVSS

SEQ ID NO: 1280 - protein, 116 aa, Artificial Sequence
  Synthetic polypeptide
QVQLVESGGGVVQPGRSLRLSCAASGFTFSNDGMHWVRQAPGKGLEWVTVISSDGSHEYYADSVKGRFTISRDNSKNTLYLQVNSLRPEDAVYYCARGMGSGMDVWGHGTAVTVSS

SEQ ID NO: 1281 - protein, 116 aa, Artificial Sequence
  Synthetic polypeptide
QVQLVESGGGVVQPGRSLRLSCAASGFTFSSYGMHWVRQAPGKGLEWVAVISYDGSNKYYADSVKGRFTISRDNSKNTLYLQMNSLRAEDAVYYCANDLYYGMDVWGQGTTVTVSS

SEQ ID NO: 1282 - protein, 115 aa, Artificial Sequence
  Synthetic polypeptide
EVQLVESGGGLIQPGGSLRLSCAASGFTVSSNYMSWVRQAPGKGLEWVSVIYSGGSTYYADSVKGRFTISRDNSKNTLYLQMNSLRAEDAVYYCAREVFGYFDYWGQGTLVTVSS

SEQ ID NO: 1283 - protein, 116 aa, Artificial Sequence
  Synthetic polypeptide
QVQLVESGGGVVQPGRSLRLSCAASGFTFSSYAMHWVRQAPGKGLEWVAVISYDGSNKYYADSVKGRFTISRDNSKNTLYLQMNSLRAEDAVYYCARDLGGYFDLWGRGTLVTVSS

SEQ ID NO: 1284 - protein, 116 aa, Artificial Sequence
  Synthetic polypeptide
QVQLVESGGGVVQPGRSLRLSCAASGFTFSSYGMHWVRQAPGKGLEWVAVISYDGSNKYYADSVKGRFTISRDNSKNTLYLQMNSLRAEDAVYYCAKTSGVSLDYWGQGTLVTVSS

SEQ ID NO: 1285 - protein, 116 aa, Artificial Sequence
  Synthetic polypeptide
QVQLVQSGAEVKKPGASVKVSCKAFGYNFSSYGLTWVRQAPGQGFEWMGWITTNNGKTDYAQKFQGRVIMTTDTSTNTGYMELRSLRSDDALYYCAREGPDAFDIWGQGTKVTVSS

SEQ ID NO: 1286 - protein, 116 aa, Artificial Sequence
  Synthetic polypeptide
EVQLVESGGGLVQPGGSLRLSCAASGFTFSSYSMNWVRQAPGKGLEWVSYISSSSSTIYYADSVKGRFTISRDNAKNSLYLQMNSLRDEDAVYYCARAPGPYFDYWGQGTLVTVSS

SEQ ID NO: 1287 - protein, 116 aa, Artificial Sequence
  Synthetic polypeptide
QVQLVQSGAEVKKPGASVKVSCKASGYTFTSYGISWVRQAPGQGLEWMGWISAYNGNTNYAQKLQGRVTMTTDTSTSTAYMELRSLRSDDAVYYCARVRQRGLDYWGQGTLVTVSS

SEQ ID NO: 1288 - protein, 116 aa, Artificial Sequence
  Synthetic polypeptide
QVQLVESGGGVVQPGRSLRLSCAASGFTFSSYAMHWVRQAPGKGLEWVAVISYDGSNKYYADSVKGRFTISRDNSKNTLYLQMNSLRAEDAVYYCASELRDNFDYWGQGTLVTVSS

SEQ ID NO: 1289 - protein, 116 aa, Artificial Sequence
  Synthetic polypeptide
QVQLVESGGGVVQPGRSLRLSCAASGFTFSSYAMHWVRQAPGKGLEWVAVISYDGSNKYYADSVKGRFTISRDNSKNTLYLQMNSLRAEDAVYYCARDLGSGWYPWGQGTLVTVSS

SEQ ID NO: 1290 - protein, 116 aa, Artificial Sequence
  Synthetic polypeptide
QVQLVESGGGVVQPGRSLRLSCAASGFTFSSYAMHWVRQAPGKGLEWVAVISYDGSNKYYADSVKGRFTISRDNSKNTLYLQMNSLRAEDAVYYCARGPGESIDYWGQGTLVTVSS

SEQ ID NO: 1291 - protein, 116 aa, Artificial Sequence
  Synthetic polypeptide
QVQLVQSGAEVKKPGSSVKVSCKASGGTFSNYAISWVRQAPGQGPEWMGGITAIVQTLKYAQKFQGRVTITRDDSTSTAYMELSSLRSEDAVYYCARGLNGDFDYWGQGTLVTVSS

SEQ ID NO: 1292 - protein, 116 aa, Artificial Sequence
  Synthetic polypeptide
QVQLVESGGGVVQPGRSLRLSCAASGFTFSSYGMHWVRQAPGKGLEWVAVISYDGSNKYYADSVKGRFTISRDNSKNTLYLQMNSLRAEDAVYYCARDGKLNFDYWGQGTLVTVSS

SEQ ID NO: 1293 - protein, 116 aa, Artificial Sequence
  Synthetic polypeptide
QVQLVESGGGVVQPGRSLRLSCAASGFTFSSYAMHWVRQAPGKGLEWVAVISYDGSNKYYADSVKGRFTISRDNSKNTLYLQMNSLRAEDAVYYCAREVGAGGDYWGQGTLVTVSS

SEQ ID NO: 1294 - protein, 116 aa, Artificial Sequence
  Synthetic polypeptide
QVQLVESGGGVVQPGRSLRLSCAASGFTFSSYAMHWVRQAPGKGLEWVAVISYDGSNKYYADSVKGRFTISRDNSKNTLYLQMNSLRAEDAVYYCASELLWFGECWGQGTLVTVSS

SEQ ID NO: 1295 - protein, 116 aa, Artificial Sequence
  Synthetic polypeptide
QVQLVESGGGVVQPGRSLRLSCAASGFTFSSYAMHWVRQAPGKGLEWVAVISYDGSNKYYADSVKGRFTISRDNSKNTLYLQMNSLRAEDAVYYCAGELLGAFDIWGQGTMVTVSS

SEQ ID NO: 1296 - protein, 116 aa, Artificial Sequence
  Synthetic polypeptide
QVQLVESGGGVVQPGRSLRLSCAASGFTFSSYAMHWVRQAPGKGLEWVAVISYDGSNKYYADSVKGRFTISRDNSKNTLYLQMNSLRAEDAVYYCVGALLESFDYWGQGTLVTVSS

SEQ ID NO: 1297 - protein, 116 aa, Artificial Sequence
  Synthetic polypeptide
EVQLVESGGGLVQPGGSLRLSCAASGFTFSSYSMNWVRQAPGKGLEWVSYISSSSSTIYYADSVKGRFTISRDNAKNSLYLQMNSLRDEDAVYYCARDLGGSGWYWGQGTLVTVSS

SEQ ID NO: 1298 - protein, 116 aa, Artificial Sequence
  Synthetic polypeptide
QVQLVESGGGVVQPGRSLRLSCAASGFTFSSYGMHWVRQAPGKGLEWVAVISYDGSNKYYADSVKGRFTISRDNSKNTLYLQMNSLRAEDAVYYCAKELLRGLDYWGQGTLVTVSS

SEQ ID NO: 1299 - protein, 116 aa, Artificial Sequence
  Synthetic polypeptide
QVQLVESGGGVVQPGRSLRLSCAASGFTFSSYGMHWVRQAPGKGLEWVAVISYDGSNKYYADSVKGRFTISRDNSKNTLYLQMNSLRAEDAVYYCAKEGIVAFDYWGQGTLVTVSS

SEQ ID NO: 1300 - protein, 116 aa, Artificial Sequence
  Synthetic polypeptide
QVQLVESGGGVVQPGRSLRLSCAASGFTFSSYGMHWVRQAPGKGLEWVAVISYDGSNKYYADSVKGRFTISRDNSKNTLYLQMNSLRAEDAVYYCALELVLALDYWGQGTLVTVSS

SEQ ID NO: 1301 - protein, 116 aa, Artificial Sequence
  Synthetic polypeptide
QVQLVESGGGVVQPGRSLRLSCAASGFTFSSYAMHWVRQAPGKGLEWVAVISYDGSNKYYADSVKGRFTISRDNSKNTLYLQMNSLRAEDAVYYCARDSGAMLDYWGQGTLVTVSS

SEQ ID NO: 1302 - protein, 117 aa, Artificial Sequence
  Synthetic polypeptide
QVQLVESGGGVVQPGRSLRLSCAASGFTFSSYAMHWVRQAPGKGLEWVAVISYDGSNKYYADSVKGRFTISRDNSKNTLYLQMNSLRAEDAVYYCARELSYYGMDVWGQGTTVTVSS

SEQ ID NO: 1303 - protein, 117 aa, Artificial Sequence
  Synthetic polypeptide
QVQLVESGGGVVQPGRSLRLSCAASGFTFSSYGMHWVRQAPGKGLEWVAVIWYDGSNKYYADSVKGRFTISRDNSKNTLYLQMNSLRAEDAVYYCARTLVYYYMDVWGKGTTVTISS

SEQ ID NO: 1304 - protein, 117 aa, Artificial Sequence
  Synthetic polypeptide
QVQLVESGGGVVQPGRSLRLSCAASGFTFSSYAMHWVRQAPGKGLEWVAVISYDGSNKYYADSVKGRFTISRDNSKNTLYLQMNSLRAEDAVYYCARDRSGWYLDYWGQGTLVTVSS

SEQ ID NO: 1305 - protein, 117 aa, Artificial Sequence
  Synthetic polypeptide
QVQLVESGGGVVQPGRSLRLSCAASGFTFSSYAMHWVRQAPGKGLEWVAVISYDGSNKYYADSVKGRFTISRDNSKNTLYLQMNSLRAEDAVYYCAREGPLDAFDIWGQGTMVTVSS

SEQ ID NO: 1306 - protein, 118 aa, Artificial Sequence
  Synthetic polypeptide
QITLKESGPTLVKPTQTLTLTCTFSGFSLSTSGVGVGWIRQPPGKALEWLALIYWDDDKRYSPSLKSRLTITKDTSKNQVVLTMTNMDPVDATYYCAHHIVATIWDYWGQGTLVTVSS

SEQ ID NO: 1307 - protein, 117 aa, Artificial Sequence
  Synthetic polypeptide
QVQLVESGGGVVQPGRSLRLSCAASGFTFNNYAMHWVRQAPGKGLEWVAVISYDGILKHYADSVKGRFTISRDNSKNTLYLQMHSLRAEDAVYYCARDLSGYGFDYWGQGILVSVSS

SEQ ID NO: 1308 - protein, 116 aa, Artificial Sequence
  Synthetic polypeptide
EVQLVESGGGLVQPGGSLRLSCAASGFTVSSNYMSWVRQAPGKGLEWVSVIYSGGSTYYADSVKGRFTISRHNSKNTLYLQMNSLRAEDAVYYCARDYGDLWFDPWGQGTLVTVSS

SEQ ID NO: 1309 - protein, 117 aa, Artificial Sequence
  Synthetic polypeptide
QVQLVESGGGVVQPGRSLRLSCAASGFTFSSYAMHWVRQAPGKGLEWVAVISYDGSNKYYADSVKGRFTISRDNSKNTLYLQMNSLRAEDAVYYCARALVYYGMDVWGQGTTVTVSS

SEQ ID NO: 1310 - protein, 118 aa, Artificial Sequence
  Synthetic polypeptide
RVTLRESGPALVKPTQTLTLTCTFSGFSLSTSGMCVSWIRQPPGKALEWLARIDWDDDKYYSTSLKTRLTISKDTSKNQVVLTMTNMDPVDATYYCARTYGGPPFDYWGQGTLVTVSS

SEQ ID NO: 1311 - protein, 118 aa, Artificial Sequence
  Synthetic polypeptide
QITLKESGPTLVKPTQTLTLTCTFSGFSLSTSGVGVGWIRQPPGKALEWLALIYWDDDKRYSPSLKSRLTITKDTSKNQVVLTMTNMDPVDATYYCAHYTAMVLFDYWGQGTLVTVSS

SEQ ID NO: 1312 - protein, 117 aa, Artificial Sequence
  Synthetic polypeptide
QVQLVESGGGVVQPGRSLRLSCAASGFTFSSYGMHWVRQAPGKGLEWVAVIWYDGSNKYYADSVKGRFTISRDNSKNTLYLQMNSLRAEDAVYYCARVLSHYGMDVWGQGTTVTVSS

SEQ ID NO: 1313 - protein, 117 aa, Artificial Sequence
  Synthetic polypeptide
QVQLVESGGGVVQPGRSLRLSCAASGFIFSNFGMHWVRQAPGKGLEWVAALWYDGTKKYNADSVKGRFTISRDNSKNTLYLQMNSLSAEDAVYYCVREGSGSYGDYWGQGTLVTVSS

SEQ ID NO: 1314 - protein, 117 aa, Artificial Sequence
  Synthetic polypeptide
EVQLVESGGGLVKPGGSLRLSCAASGFTFSSYSMNWVRQAPGKGLEWVSSISSSSSYIYYADSVKGRFTISRDNAKNSLYLQMNSLRAEDAVYYCARYAAGYYFDYWGQGTLVTVSS

SEQ ID NO: 1315 - protein, 117 aa, Artificial Sequence
  Synthetic polypeptide
QVQLVESGGGVVQPGRSLRLSCAASGFTFSSYGMHWVRQAPGKGLEWVAVISYDGSNKYYADSVKGRFTISRDNSKNTLYLQMNSLRAEDAVYYCVGELPYYGMDVWGQGTTVTVSS

SEQ ID NO: 1316 - protein, 117 aa, Artificial Sequence
  Synthetic polypeptide
QVQLVQSGAEVKKPGASVKVSCKASGYTFTSYYMHWVRQAPGQGLEWMGIINPSGGSTSYAQKFQGRVTMTRDTSTSTVYMELSSLRSEDAVYYCARDDSSGYYGYWGQGTLVTVSS

SEQ ID NO: 1317 - protein, 116 aa, Artificial Sequence
  Synthetic polypeptide
QVQLQQWGAGLLKPSETLSLTCAVYGGSFSGYYWSWIRQPPGKGLEWIGEINHSGSTNYNPSLKSRVTISVDTSKNQFSLKLSSVTAADAVYYCARDQSVYGMDVWGQGTTVTVSS

SEQ ID NO: 1318 - protein, 118 aa, Artificial Sequence
  Synthetic polypeptide
RVTLRESGPALVKPTQTLTLTCTFSGFSLSTSGMCVSWIRQPPGKALEWLARIDWDDDKYYSTSLKTRLTISKDTSKNQVVLTMTNMDPVDATYYCARMTTVTTLDYWGQGTLVTVSS

SEQ ID NO: 1319 - protein, 117 aa, Artificial Sequence
  Synthetic polypeptide
EVQLVESGGGLVQPGGSLRLSCAASGFTFSSYWMSWVRQAPGKGLEWVANIKQDGSEKYYVDSVKGRFTISRDNAKNSLYLQMNSLRAEDAVYYCAREGGDYSFDYWGQGTLVTVSS

SEQ ID NO: 1320 - protein, 117 aa, Artificial Sequence
  Synthetic polypeptide
QVQLVQSGAEVKKPGASVKVSCKASGYTFTSYGISWVRQAPGQGLEWMGWISAYNGNTNYAQKLQGRVTMTTDTSTSTAYMELRSLRSDDAVYYCARAVDHGWFDPWGQGTLVTVSS

SEQ ID NO: 1321 - protein, 117 aa, Artificial Sequence
  Synthetic polypeptide
QVQLVESGGGVVQPGRSLRLSCAAFGFTFSFYALHWVRQAPGKGLEWVAVISYDGSNKYYADSVKGRFTISRDNSKNTLYLDVNSLRAEDAVYYCARGDGYNYFDYWGQGTLVTVSS

SEQ ID NO: 1322 - protein, 116 aa, Artificial Sequence
  Synthetic polypeptide
EVQLVESGGGLIQPGGSLRLSCAASGFTVSSNYMSWVRQAPGQGLEWVSVIYSGGSTYYADSVKGRFTISRDNSKNTLYLQMNSLRAEDAVYYCARDLGDYGMDVGGQGTTVTVSS

SEQ ID NO: 1323 - protein, 118 aa, Artificial Sequence
  Synthetic polypeptide
QLQLQESGPGLVKPSETLSLTCTVSGGSFRNSTHHWGWIRQPPGRGLEWIGNIYYSGSTYYNPSLQSRVTISGDTSKNQFSLQLTSVTAADAVYYCARDLPFYGMDVWGQGTTVTVSS

SEQ ID NO: 1324 - protein, 116 aa, Artificial Sequence
  Synthetic polypeptide
EVQLVESGGGLIQPGGSLRLSCAASGFTVSSNYMSWVRQAPGKGLEWVSVIYSGGSTYYADSVKGRFTISRDNSKNTLYLQMNSLRAEDAVYYCARDKGDDAFDIWGQGTMVTVSS

SEQ ID NO: 1325 - protein, 116 aa, Artificial Sequence
  Synthetic polypeptide
QVQLQQWGAGLLKPSETLSLTCAVYGGSFSGYYWSWIRQPPGKGLEWIGEINHSGSTNYNPSLKSRVTISVDTSKNQFSLKLSSVTAADAVYYCARDRTGDGMDVWGQGTTVTVSS

SEQ ID NO: 1326 - protein, 117 aa, Artificial Sequence
  Synthetic polypeptide
EVQLLESGGGLVQPGGSLRLSCAASGFTFSSYAMSWVRQAPGKGLEWVSAISGSGGSTYYADSVKGRFTISRDNSKNTLYLQMNSLRAEDAVYYCAKEGGNLGFDYWGQGTLVTVSS

SEQ ID NO: 1327 - protein, 117 aa, Artificial Sequence
  Synthetic polypeptide
QVQLVESGGGVVQPGRSLRLSCAASGFTFSSYAMHWVRQAPGKGLEWVAVISYDGSNKYYADSVKGRFTISRDNSKNTLYLQMNSLRAEDAVYYCARDGYTQYFDYWGQGTLVTVSS

SEQ ID NO: 1328 - protein, 117 aa, Artificial Sequence
  Synthetic polypeptide
QVQLVQSGAEVKKPGASVKVSCKASGYTFTSYGISWVRQAPGQGLEWMGWISAYNGNTNYAQKLQGRVTMTTDTSTSTAYMELRSLRSDDAVYYCAGGSYYDAFDIWGQGTMVTVSS

SEQ ID NO: 1329 - protein, 116 aa, Artificial Sequence
  Synthetic polypeptide
QVQLQESGPGLVKPSGTLSLTCAVSGGSISSTYWWSWVRQPPGKGLEWIGEIHHSGSTNYNPSLKTRVTISVDESKNQFSLKLSSVTAADAVYYCARDLKSYGMDVWGQGTTVTVS

SEQ ID NO: 1330 - protein, 116 aa, Artificial Sequence
  Synthetic polypeptide
QVQLQQWGAGLLKPSETLSLTCAVYGGSFSGYYWSWIRQPPGKGLEWIGEINHSGSTNYNPSLKSRVTISVDTSKNQFSLKLSSVTAADAVYYCAREVYGVGFDYWGQGTLVTVSS

SEQ ID NO: 1331 - protein, 116 aa, Artificial Sequence
  Synthetic polypeptide
QVQLQESGPGLVKPSETLSLTCTVSGGSISSYYWSWIRQPAGKGLEWIGRIYTSGSTNYNPSLKSRVTMSVDTSKNQFSLKLSSVTAADAVYYCAGDSGWYVFDYWGQGTLVTVSS

SEQ ID NO: 1332 - protein, 117 aa, Artificial Sequence
  Synthetic polypeptide
EVQLVESGGGLVQPGGSLRLSCAASGFIFSSYWMSWVRQAPGKGLEWVANIKQDGSEKYYVDSVKGRFTISRDNAQNSLYLQMNSLRAEDAVYYCARDRAINWFDPWGQGTLVTVSS

SEQ ID NO: 1333 - protein, 118 aa, Artificial Sequence
  Synthetic polypeptide
RVTLRESGPALVKPTQTLTLTCTFSGFSLSTSGMCVSWIRQPPGKALEWLARIDWDDDKYYSTSLKTRLTISKDTSKNQVVLTMTNMDPVDATYYCARMAVNTGLDYWGQGTLVTVSS

SEQ ID NO: 1334 - protein, 118 aa, Artificial Sequence
  Synthetic polypeptide
QITLKESGPTLVKPTQTLTLTCTFSGFSLSTSGVGVGWIRQPPGKALEWLALIYWDDDKRYSPSLKSRLTITKDTSKNQVVLTMTNMDPVDATYYCAHRVTISGFDPWGQGTLVTVSS

SEQ ID NO: 1335 - protein, 118 aa, Artificial Sequence
  Synthetic polypeptide
QITLKESGPTLVKPTQTLTLTCSFSGFSFSSPGVNVGWIRQPPGKALEWLALIYWDDDKRYSPSLKSRLTITKDASKNEVVLTLTNMDPVDGTYYCAHRMGRGAFDPWGQGTLVTVSS

SEQ ID NO: 1336 - protein, 117 aa, Artificial Sequence
  Synthetic polypeptide
QVQLVESGGGVVQPGRSLRLSCAASGFTFSSYGMHWVRQAPGKGLEWVAVIWYDGSNKYYADSVKGRFTISRDNSKNTLYLQMNSLRAEDAVYYCAGGSFYYGMDVWGQGTTVTVSS

SEQ ID NO: 1337 - protein, 118 aa, Artificial Sequence
  Synthetic polypeptide
EVQLVQSGAEVKKPGESLKISCKGSGYSFTSYWIGWVRQMPGKGLEWMGIIYPGDSDTRYSPSFQGQVTISADKSISTAYLQWSSLKASDAMYYCARHAHYYYGMDVWGQGTTVTVSS

SEQ ID NO: 1338 - protein, 118 aa, Artificial Sequence
  Synthetic polypeptide
QVQLVESGGGVVQPGRSLRLSCAASGFTFSSYAMHWVRQAPGKGLEWVAVISYDGSNKYYADSVKGRFTISRDNSKNTLYLQMNSLRAEDAVYYCARARDGYRNFDYWGQGTLVTVSS

SEQ ID NO: 1339 - protein, 117 aa, Artificial Sequence
  Synthetic polypeptide
QVQLVESGGGVVQPGRSLRLSCAASGFFFSNYGMHWVRQSPGKGLEWVAVISFDGFNKYYTDSVKGRVTVSRDDSKNTLYLQMNSLRTEDAVYFCARARDGYNHFDYWGQGTLVTVS

SEQ ID NO: 1340 - protein, 118 aa, Artificial Sequence
  Synthetic polypeptide
QVQLVESGGGVVQPGRSLRLSCAASGFTFSSYAMHWVRQAPGKGLEWVAVISYDGSNKYYADSVKGRFTISRDNSKNTLYLQMNSLRAEDAVYYCAGGLLWFGELWYWGQGTLVTVSS

SEQ ID NO: 1341 - protein, 118 aa, Artificial Sequence
  Synthetic polypeptide
QVQLVESGGGVVQPGRSLRLSCAASGFTFSSYAMHWVRQAPGKGLEWVAVISYDGSNKYYADSVKGRFTISRDNSKNTLYLQMNSLRAEDAVYYCAREDPMIDAFDIWGQGTMVTVSS

SEQ ID NO: 1342 - protein, 118 aa, Artificial Sequence
  Synthetic polypeptide
QVQLVESGGGVVQPGRSLRLSCAASGFTFSNYPMHWVRQAPGKGLEWVAVISYDGSNKYYADSVKGRFTISRDNSKNTLYLQMNSLRAEDAVYYCARDSSGWYYFDCWGQGTLVTVSS

SEQ ID NO: 1343 - protein, 118 aa, Artificial Sequence
  Synthetic polypeptide
QVQLVESGGGVVQPGRSLRLSCAASGFTFSSYGMHWVRQAPGKGLEWVAVIWYDGSNKYYADSVKGRFTISRDNSKNTLYLQMNSLRAEDAVYYCASSGSAYYGMDVWGQGTTVTVSS

SEQ ID NO: 1344 - protein, 118 aa, Artificial Sequence
  Synthetic polypeptide
QVQLVQSGAEVKKPGASVKVSCKASGYTFTGYYMHWVRQAPGQGLEWMGWINPNSGGTNYAQKFQGRVTMTRDTSISTAYMELSRLRSDDAVYYCARSLWFGELSGYWGQGTLVTVSS

SEQ ID NO: 1345 - protein, 118 aa, Artificial Sequence
  Synthetic polypeptide
EVQLVQSGAEVKKPGESLKISCKGSGYSFTSYWIGWVRQMPGKGLEWMGIIYPGDSDTRYSPSFQGQVTISADKSISTAYLQWSSLKASDAMYYCARRLAAAGTFDYWGQGTLVTVSS

SEQ ID NO: 1346 - protein, 118 aa, Artificial Sequence
  Synthetic polypeptide
EVQLVESGGGLVKPGGSLRLSCAASGFTFSFYSMNWVRQAPGKGLEWVSSISSSSSYIYYADSVKGRFTISRDNAKNSLYLQMNSLRAEDAVYYCARDVYSSGWLDYWGQGTLVTVSS

SEQ ID NO: 1347 - protein, 118 aa, Artificial Sequence
  Synthetic polypeptide
QVQLVESGGGVVQPGRSLRLSCAASGFTFSSYAMHWVRQAPGKGLEWVAVISYDGSNKYYADSVKGRFTISRDNSKNTLYLQMNSLRAEDAVYYCARGDNYVSPFDYWGQGTLVTVSS

SEQ ID NO: 1348 - protein, 119 aa, Artificial Sequence
  Synthetic polypeptide
QITLKESGPTLVKPTQTLTLTCTFSGFSLSTSGVGVGWIRQPPGKALEWLALIYWDDDKRYSPSLKSRLTITKDTSKNQVVLTMTNMDPVDATYYCAHRRLFYGYYDYWGQGTLVTVSS

SEQ ID NO: 1349 - protein, 117 aa, Artificial Sequence
  Synthetic polypeptide
QVQLQESGPGLVKPSETLSLTCTVSGGSISSYYWSWIRQPPGKGLEWIGYIYYSGSTNYNPSLKSRVTISVDTSKNQFSLKLSSVTAADAVYYCAREDDYGDYLDYWGQGTLVTVSS

SEQ ID NO: 1350 - protein, 118 aa, Artificial Sequence
  Synthetic polypeptide
QVQLVESGGGVVQPGRSLRLSCAASGFTFSNYALHWVRQAPGKGLEWVTIISYDGSNKYYADSAKGRFTISRDNSKNTLYLHMNSLRVEDALYYCARADGYNAPFDYWGQGTLVTVSS

SEQ ID NO: 1351 - protein, 118 aa, Artificial Sequence
  Synthetic polypeptide
QVQLVESGGGVVQPGRSLRLSCAASGFTFSSYAMHWVRQAPGKGLEWVAVISYDGSNKYYADSVKGRFTISRDNSKNTLYLQMNSLRAEDAVYYCAREEVTTDAFDIWGQGTMVTVSS

SEQ ID NO: 1352 - protein, 119 aa, Artificial Sequence
  Synthetic polypeptide
QITLKESGPTLVKPTQTLTLTCTFSGFSLSTSGVGVGWIRQPPGKALEWLALIYWDDDKRYSPSLKSRLTITKDTSKNQVVLTMTNMDPVDATYYCAHRLPIYDAFDIWGQGTMVTVSS

SEQ ID NO: 1353 - protein, 118 aa, Artificial Sequence
  Synthetic polypeptide
QVQLVESGGGVVQPGRSLRLSCAASGFTFSTYGMHWVRQAPGKGLEWVAVIWYDGSNTYYADSVKGRFTISRDNSKNTLYLQMNSLRDEDAVYYCARDGASGWYFDYWGQGTLVTVSS

SEQ ID NO: 1354 - protein, 118 aa, Artificial Sequence
  Synthetic polypeptide
QVQLVESGGGVVQPGRSLRLSCAASGFTFSSYGMHWVRQAPGKGLEWVAVISYDGSNKYYADSVKGRFTISRDNSKNTLYLQMNSLRAEDAVYYCAKDLGGYSYFDYWGQGTLVTVSS

SEQ ID NO: 1355 - protein, 118 aa, Artificial Sequence
  Synthetic polypeptide
QVQLVESGGGVVQPGRSLRLSCAASGFTFSSYGMHWVRQAPGKGLEWVAVISYDGSNKYYADSVKGRFTISRDNSKNTLYLQMNSLRAEDAVYYCAKERQWLAYFDYWGQGTLVTVSS

SEQ ID NO: 1356 - protein, 118 aa, Artificial Sequence
  Synthetic polypeptide
QVQLVESGGGVVQPGRSLRLSCAASGFTFSSYGMHWVRQAPGKGLEWVAVIWYDGSNKYYADSVKGRFTISRDNSKNTLYLQMNSLRAEDAVYYCARDGQLLYAFDIWGQGTMVTVSS

SEQ ID NO: 1357 - protein, 118 aa, Artificial Sequence
  Synthetic polypeptide
QVQLVESGGGVVQPGRSLRLSCAASGFTFSSYGMHWVRQAPGKGLEWVAVIWYDGSNKYYADSVKGRFTISRDNSKNTLYLQMNSLRAEDAVYYCARDLRFGEYDDYWGQGTLVTVSS

SEQ ID NO: 1358 - protein, 118 aa, Artificial Sequence
  Synthetic polypeptide
QVQLVESGGGVVQPGRSLRLSCAASGFTFSSYAMHWVRQAPGKGLEWVAVISYDGSNKYYADSVKGRFTISRDNSKNTLYLQMNSLRAEDAVYYCAREVVVIDAFDIWGQGTMVTVSS

SEQ ID NO: 1359 - protein, 119 aa, Artificial Sequence
  Synthetic polypeptide
RVTLRESGPALVKPTQTLTLTCTFSGFSLSTSGMCVSWIRQPPGKALEWLARIDWDDDKYYSTSLKTRLTISKDTSKNQVVLTMTNMDPVDATYYCARELAAAVPFDYWGQGTLVTVSS

SEQ ID NO: 1360 - protein, 118 aa, Artificial Sequence
  Synthetic polypeptide
QVQLVESGGGVVQPGRSLRLSCAASGFTFSSYGMHWVRQAPGKGLEWVAVIWYDGSNKYYADSVKGRFTISRDKSKNTLYLQMNSLRAEDAVYYCARESGSGSYPDYWGQGTLVTVSS

SEQ ID NO: 1361 - protein, 118 aa, Artificial Sequence
  Synthetic polypeptide
QVQLVESGGGVVQPGRSLRLSCAASGFTFSSYGMHWVRQAPGKGLEWVAVLSYDGSNKYYADSVKGRFTISRDNSKNTLYLQMNSLRAEDAVYYCAKDYSDYGGMDVWGQGTTVTVSS

SEQ ID NO: 1362 - protein, 119 aa, Artificial Sequence
  Synthetic polypeptide
QLQLQESGPGLVKPSETLSLTCTVSGGSISSSSYYWGWIRQPPGKGLEWIGSIYYSGSTYYNPSLKSRVTISVDTSKNQFSLKLSSVTAADAVYYCARLEWLRGGFDYWGQGTLVTVSS

SEQ ID NO: 1363 - protein, 117 aa, Artificial Sequence
  Synthetic polypeptide
QVQLQQWGAGLLKPSETLSLTCAVYGGSFSGYYWSWIRQPPGKGLEWIGEINHSGSTNYNPSLKSRVTISVDTSKNQFSLKLSSVTAADAVYYCAKFGIAAAGFDYWGQGTLVTVSS

SEQ ID NO: 1364 - protein, 118 aa, Artificial Sequence
  Synthetic polypeptide
QVQLVESGGGVVQPGRSLRLSCAASGFTFSSYGMHWVRQAPGKGLEWVAVIWYDGSNKYYADSVKGRFTISRDNSKNTLYLQMNSLRAEDAVYYCASGLLDYYGMDVWGQGTTVTVSS

SEQ ID NO: 1365 - protein, 118 aa, Artificial Sequence
  Synthetic polypeptide
QVQLVESGGGVVQPGRSLRLSCAASGFTFSSYAMHWVRQAPGKGLEWVAVISYDGSNKYYADSVKGRFTISRDNSKNTLYLQMNSLRAEDAVYYCAREDYGDYGFDYWGQGTLVTVSS

SEQ ID NO: 1366 - protein, 118 aa, Artificial Sequence
  Synthetic polypeptide
QVQLVESGGGVVQPGRSLRLSCAASGFTFSSYAMHWVRQAPGKGLEWVAVISYDGSNKYYADSVKGRFTISRDNSKNTLYLQMNSLRAEDAVYYCARDRGGYLYFDYWGQGTLVTVSS

SEQ ID NO: 1367 - protein, 118 aa, Artificial Sequence
  Synthetic polypeptide
QVQLVESGGGVVQPGRSLRLSCAASGFTFSSYGMHWVRQAPGKGLEWVAVIWYDGSNKYYADSVKGRFTISRDNSKNTLYLQMNSLRAEDAVYYCARDLAVGATDDYWGQGTLVTVSS

SEQ ID NO: 1368 - protein, 118 aa, Artificial Sequence
  Synthetic polypeptide
QVQLVESGGGVVQPGRSLRLSCAASGFTFSSYAMHWVRQAPGKGLEWVAVISYDGSNKYYADSVKGRFTISRDNSKNTLYLQMNSLRAEDAVYYCARWLGGYYGMDVWGQGTTVTVSS

SEQ ID NO: 1369 - protein, 119 aa, Artificial Sequence
  Synthetic polypeptide
QITLKESGPTLVKPTQTLTLTCTFSGFSLSTSGVGVGWIRQPPGKALEWLALIYWDDDKRYSPSLKSRLTITKDTSKNQVVLTMTNMDPVDATYYCAHRIGWNYYFDYWGQGTLVTVSS

SEQ ID NO: 1370 - protein, 118 aa, Artificial Sequence
  Synthetic polypeptide
QVQLVESGGGVVQPGRSLRLSCAASGFTFSSYAMHWVRQAPGKGLEWVAVISYDGSNKYYADSVKGRFTISRDNSKNTLYLQMNSLRAEDAVYYCARSSSGYYPFDYWGQGTLVTVSS

SEQ ID NO: 1371 - protein, 118 aa, Artificial Sequence
  Synthetic polypeptide
QVQLVESGGGVVQPGRSLRLSCAASGFTFSSYGMHWVRQAPGKGLEWVAVIWYDGSNKYYADSVKGRFTISRDNSKNTLYLQMNSLRAEDAVYYCAGTASYYYGMDVWGQGTTVTVSS

SEQ ID NO: 1372 - protein, 117 aa, Artificial Sequence
  Synthetic polypeptide
QVQLQESGPGLVKPSETLSLTCTVSGGSISSYYWSWIRQPPGKGLEWIGYIYYSGSTNYNPSLKSRVTISVDTSKNQFSLKLSSVTAADAVYYCARARWLRGEFDYWGQGTLVTVSS

SEQ ID NO: 1373 - protein, 118 aa, Artificial Sequence
  Synthetic polypeptide
QVQLVESGGGVVQPGRSLRLSCAASGFTFSSYAMHWVRQAPGKGLEWVAVISYDGSNKYYADSVKGRFTISRDNSKNTLYLQMNSLRAEDAVYYCARGKGSYYYMDVWGKGTTVTVSS

SEQ ID NO: 1374 - protein, 118 aa, Artificial Sequence
  Synthetic polypeptide
QVQLVESGGGVVQPGRSLRLSCAASGFTFSSYAMHWVRQAPGKGLEWVAVISYDGSNKYYADSVKGRFTISRDNSKNTLYLQMNSLRAEDAVYYCASSLLPLYGMDVWGQGTTVTVSS

SEQ ID NO: 1375 - protein, 118 aa, Artificial Sequence
  Synthetic polypeptide
QVQLVESGGGVVQPGRSLRLSCAASGFTFSSYGMHWVRQAPGKGLEWVAVISYDGSNKYYADSVKGRFTISRDNSKNTLYLQMNSLRAEDAVYYCAKGYSGYYYFDYWGQGTLVTVSS

SEQ ID NO: 1376 - protein, 120 aa, Artificial Sequence
  Synthetic polypeptide
EVQLVESGGGLVQPGRSLRLSCTASGFTFGDYAMSWVRQAPGKGLEWVGFIRSKAYGGTTEYAASVKGRFTISRDDSKSIAYLQMNSLKTEDAVYYCTRDNFWSGYSGYWGQGTLVTVSS

SEQ ID NO: 1377 - protein, 118 aa, Artificial Sequence
  Synthetic polypeptide
QVQLVESGGGVVQPGRSLRLSCAASGFTFSSYGMHWVRQAPGKGLEWVAVIWYDGSNKYYADSVKGRFTISRDNSKNTLYLQMNSLRAEDAVYYCARAASSYYGMDVWGQGTTVTVSS

SEQ ID NO: 1378 - protein, 118 aa, Artificial Sequence
  Synthetic polypeptide
QVQLVESGGGVVQPGRSLRLSCAASGFTFSSYAMHWVRQAPGKGLEWVAVISYDGSNKYYADSVKGRFTISRDNSKNTLYLQMNSLRAEDAVYYCARVLIPHYGMDVWGQGTTVTVSS

SEQ ID NO: 1379 - protein, 118 aa, Artificial Sequence
  Synthetic polypeptide
QVQLVESGGGVVQPGRSLRLSCAASGFTFSSYGMHWVRQAPGKGLEWVAVIWYDGSNKYYADSVKGRFTISRDNSKNTLYLQMNSLRAEDAVYYCARDGKWLRTLDYWGQGTLVTVSS

SEQ ID NO: 1380 - protein, 118 aa, Artificial Sequence
  Synthetic polypeptide
EVQLLESGGGLVQPGGSLRLSCAASGFTFSSYAMSWVRQAPGKGLEWVSAISGSGGSTYYADSVKGRFTISRDNSKNTLYLQMNSLRAEDAVYYCAKVDGSGSSFDYWGQGTLVTVSS

SEQ ID NO: 1381 - protein, 118 aa, Artificial Sequence
  Synthetic polypeptide
EVQLVESGGGLVQPGGSLRLSCAASGFTFSSYWMSWVRQAPGKGLEWVANIKQDGSEKYYVDSVKGRFTISRDNAKNSLYLQMNSLRAEDAVYYCASLPSSGWYFHYWGQGTLVTVSS

SEQ ID NO: 1382 - protein, 118 aa, Artificial Sequence
  Synthetic polypeptide
QVQLVQSGAEVKKPGSSVKVSCKASGGTFSSYAISWVRQAPGQGLEWMGRIIPILGIANYAQKFQGRVTITADKSTSTAYMELSSLRSEDAVYYCAEGYSSSWYLDYWGQGTLVTVSS

SEQ ID NO: 1383 - protein, 118 aa, Artificial Sequence
  Synthetic polypeptide
QVQLVESGGGVVQPGRSLRLSCAASGFTFSIYAMHWVRQAPGKGLEWVAVISYDGSNKYYADSVKGRFTISRDNSKNTLYLQMNSLRAEDAVYYCAREGGYLDAFDIWGQGTMVTVSS

SEQ ID NO: 1384 - protein, 117 aa, Artificial Sequence
  Synthetic polypeptide
QVQLQQWGAGLLKPSETLSLTCAVYGGSFSGYYWSWIRQPPGKGLEWIGEINHSGSTNYNPSLKSRVTISVDTSKNQFSLKLSSVTAADAVYYCARGGWSLWYFDYWGQGTLVTVSS

SEQ ID NO: 1385 - protein, 119 aa, Artificial Sequence
  Synthetic polypeptide
RVTLRESGPALVKPTQTLTLTCTFSGFSLSTSGMCVSWIRQPPGKALEWLARIDWDDDKYYSTSLKTRLTISKDTSKNQVVLTMTNMDPVDATYYCAREYSGYVGFDYWGQGTLVTVSS

SEQ ID NO: 1386 - protein, 118 aa, Artificial Sequence
  Synthetic polypeptide
QVQLVESGGGVVQPGRSLRLSCAASGFTFSSYGMHWVRQAPGKGLEWVAVIWYDGSNKYYADSVKGRFTISRDNSKNTLYLQMNSLRAEDAVYYCAKDAGLGYYFDYWGQGTLVTVSS

SEQ ID NO: 1387 - protein, 117 aa, Artificial Sequence
  Synthetic polypeptide
QVQLQQWGAGLLKPSETLSLTCAVYGGSFSGYYWSWIRQPPGKGLEWIGEINHSGSTNYNPSLKSRVTISVDTSKNQFSLKLSSVTAADAVYYCARDREGGYGMDVWGQGTTVTVSS

SEQ ID NO: 1388 - protein, 118 aa, Artificial Sequence
  Synthetic polypeptide
QVQLVESGGGVVQPGRSLRLSCAASGFTFSSYGMHWVRQAPGKGLEWVAVISYDGSNKYYADSVKGRFTISRDNSKNTLYLQMNSLRAEDAVYYCANSLLWFGELWNWGQGTLVTVSS

SEQ ID NO: 1389 - protein, 118 aa, Artificial Sequence
  Synthetic polypeptide
QVQLVESGGGVVQPGRSLRLSCAASGFTFSSYGMHWVRQAPGKGLEWVAVIWYDGSNKYYADSVKGRFTISRDNSKNTLYLQMNSLRAEDAVYYCARDLAVGDAFDIWGQGTMVTVSS

SEQ ID NO: 1390 - protein, 118 aa, Artificial Sequence
  Synthetic polypeptide
QVQLVESGGGVVQPGRSLRLSCAASGFTFSSYGMHWVRQAPGKGLEWVAVIWYDGSNKYYADSVKGRFTISRDNSKNTLYLQMNSLRAEDAVYYCARDLRVGDDFDYWGQGTLVTVSS

SEQ ID NO: 1391 - protein, 118 aa, Artificial Sequence
  Synthetic polypeptide
QVQLVQSGAEVKKPGASVKVSCKASGYTFTGYYMHWVRQAPGQGLEWMGWINPNSGGTNYAQKFQGRVTMTRDTSISTAYMELSRLRSDDAVYYCAQGVWFGELTDYWGQGTLVTVSS

SEQ ID NO: 1392 - protein, 118 aa, Artificial Sequence
  Synthetic polypeptide
QVQLVESGGGVVQPGRSLRLSCAASGFTFSSYGMHWVRQAPGKGLEWVAVIWYDGSNKYYADSVKGRFTISRDNSKNTLYLQMNSLRAEDAVYYCARDLLAAYGMDVWGQGTTVTVSS

SEQ ID NO: 1393 - protein, 118 aa, Artificial Sequence
  Synthetic polypeptide
QVQLVESGGGVVQPGRSLRLSCAASGFTFSSYGMHWVRQAPGKGLEWVAVISYDGSNKYYADSVKGRFTISRDNSKNTLYLQMNSLRAEDAVYYCAKDRDGYSYFHYWGQGTLVTVSS

SEQ ID NO: 1394 - protein, 118 aa, Artificial Sequence
  Synthetic polypeptide
QVQLVESGGGVVQPGRSLRLSCAASGFTFSSYAMHWVRQAPGKGLEWVAVISYDGSNKYYADSVKGRFTISRDNSKNTLYLQMNSLRAEDAVYYCASELSNYYGMDVWGQGTTVTVSS

SEQ ID NO: 1395 - protein, 118 aa, Artificial Sequence
  Synthetic polypeptide
QVQLVESGGGVVQPGRSLRLSCAASGFTFSSYGMHWVRQAPGKGLEWVAVIWYDGSNKYYADSVKGRFTISRDNSKNTLYLQMNSLRAEDAVYYCATQITMVDAFDIWGQGTMVTVSS

SEQ ID NO: 1396 - protein, 118 aa, Artificial Sequence
  Synthetic polypeptide
EVQLVESGGGLVQPGRSLRLSCAASGFTFDDYAMHWVRQVPGKGLEWVSGISWNSGDIHYADSVKGRFTISRDNAKNSLYLQLNSLRTEDAFYYCAKEDGYNDYFDYWGQGALVTVSS

SEQ ID NO: 1397 - protein, 118 aa, Artificial Sequence
  Synthetic polypeptide
QVQLVESGGGVVQPGRSLRLSCAASGFTFSSYGMHWVRQAPGKGLEWVAVIWYDGSNKYYADSVKGRFTISRDNSKNTLYLQMNSLRAEDAVYYCAKDGGLRRAFDYWGQGTLVTVSS

SEQ ID NO: 1398 - protein, 118 aa, Artificial Sequence
  Synthetic polypeptide
QVQLVESGGGVVQPGRSLRLSCAASGFTFSSYAMHWVRQAPGKGLEWVAVISYDGSNKYYADSVKGRFTISRDNSKNTLYLQMNSLRAEDAVYYCARDCIPSYYFDYWGQGTLVTVSS

SEQ ID NO: 1399 - protein, 118 aa, Artificial Sequence
  Synthetic polypeptide
QVQLVESGGGVVQPGRSLRLSCAASGFTFSSYGMHWVRQAPGKGLEWVAVIWYDGSNKYYADSVKGRFTISRDNSKNTLYLQMNSLRAEDAVYYCAGTLTPYYGMDVWGQGTTVTVSS

SEQ ID NO: 1400 - protein, 118 aa, Artificial Sequence
  Synthetic polypeptide
EVQLVESGGGLVKPGGSLRLSCAASGFTFSSYSMNWVRQAPGKGLEWVSSISSSSSYIYYADSVKGRFTISRDNAKNSLYLQMNSLRAEDAVYYCARDFGVSDAFDIWGQGTMVTVSS

SEQ ID NO: 1401 - protein, 118 aa, Artificial Sequence
  Synthetic polypeptide
QVQLVESGGGVVQPGRSLRLSCAASGFIFSNYAIHWVRQAPGKGLEWVAVISYDGSGQIYTDSVKGRFTISRDNSKNMLYLQMNSLRPADAVYYCARGGGDGDAFDIWGQGTVVTVSS

SEQ ID NO: 1402 - protein, 119 aa, Artificial Sequence
  Synthetic polypeptide
RVTLRESGPALVKPTQTLTLTCTFSGFSLSTSGMCVSWIRQPPGKALEWLARIDWDDDKYYSTSLKTRLTISKDTSKNQVVLTMTNMDPVDATYYCARMPVVVNAFDIWGQGTMVTVSS

SEQ ID NO: 1403 - protein, 118 aa, Artificial Sequence
  Synthetic polypeptide
QVQLVESGGGVVQPGRSLRLSCAASGFTFSSYGMHWVRQAPGKGLEWVAVISYDGSNKYYADSVKGRFTISRDNSKNTLYLQMNSLRAEDAVYYCAKVRGSYYIFDYWGQGTLVTVSS

SEQ ID NO: 1404 - protein, 118 aa, Artificial Sequence
  Synthetic polypeptide
QVQLVESGGGVVQPGRSLRLSCAASGFTFSSYAMHWVRQAPGKGLEWVAVISYDGSNKYYADSVKGRFTISRDNSKNTLYLQMNSLRAEDAVYYCARGGGYYDPFDYWGQGTLVTVSS

SEQ ID NO: 1405 - protein, 118 aa, Artificial Sequence
  Synthetic polypeptide
QVQLVESGGGVVQPGRSLRLSCAASGFTFSSYAMHWVRQAPGKGLEWVAVISYDGSNKYYADSVKGRFTISRDNSKNTLYLQMNSLRAEDAVYYCAISLLWFGELLYWGQGTLVTVSS

SEQ ID NO: 1406 - protein, 118 aa, Artificial Sequence
  Synthetic polypeptide
QVQLVESGGGVVQPGRSLRLSCAASGFTFSSYGMHWVRQAPGKGLEWVAVIWYDGSNKYYADSVKGRFTISRDNSKNTLYLQMNSLRAEDAVYYCARDLLWLRAFDYWGQGTLVTVSS

SEQ ID NO: 1407 - protein, 118 aa, Artificial Sequence
  Synthetic polypeptide
QVQLVQSGAEVKKPGASVKVSCKASGYTFTSYGISWVRQAPGQGLEWMGWISAYNGNTNYAQKLQGRVTMTTDTSTSTAYMELRSLRSDDAVYYCAREISGSYAFDYWGQGTLVTVSS

SEQ ID NO: 1408 - protein, 118 aa, Artificial Sequence
  Synthetic polypeptide
QVQLVESGGGVVQPGRSLRLSCAASGFTFSSYAMHWVRQAPGKGLEWVAVISYDGSNKYYADSVKGRFTISRDNSKNTLYLQMNSLRAEDAVYYCAREDVLSDAFDIWGQGTMVTVSS

SEQ ID NO: 1409 - protein, 117 aa, Artificial Sequence
  Synthetic polypeptide
QVQLQESGPGLVKPSETLSLTCTVSGGSISSYYWSWIRQPPGKGLEWIGYIYYSGSTNYNPSLKSRVTISVDTSKNQFSLKLSSVTAADAVYYCARQLWLRSHFDYWGQGTLVTVSS

SEQ ID NO: 1410 - protein, 119 aa, Artificial Sequence
  Synthetic polypeptide
QVTLKESGPVLVKPTETLTLTCTVSGFSLSNARMGVSWIRQPPGKALEWLAHIFSNDEKSYSTSLKSRLTISKDTSKSQVVLTMTNMDPVDATYYCARIRWGYWYFDLWGRGTLVTVSS

SEQ ID NO: 1411 - protein, 118 aa, Artificial Sequence
  Synthetic polypeptide
EVQLVESGGGLVQPGRSLRLSCAASGFTFDDYAMHWVRQAPGKGLEWVSGISWNSGSIGYADSVKGRFTISRDNAKNSLYLQMNSLRAEDALYYCAKERGYSYGLDYWGQGTLVTVSS

SEQ ID NO: 1412 - protein, 118 aa, Artificial Sequence
  Synthetic polypeptide
QVQLVESGGGVVQPGRSLRLSCAASGFTFSSYGMHWVRQAPGKGLEWVAVISYDGSNKYYADSVKGRFTISRDNSKNTLYLQMNSLRAEDAVYYCAGELLSRYGMDVWGQGTTVTVSS

SEQ ID NO: 1413 - protein, 118 aa, Artificial Sequence
  Synthetic polypeptide
EVQLVQSGAEVKKPGESLKISCKGSGYSFTSYWIGWVRQMPGKGLEWMGIIYPGDSDTRYSPSFQGQVTISADKSISTAYLQWSSLKASDAMYYCARQEHYYYGMDVWGQGTTVTVSS

SEQ ID NO: 1414 - protein, 118 aa, Artificial Sequence
  Synthetic polypeptide
QVQLVESGGGVVQPGRSLRLSCAASGFTFSSYGMHWVRQAPGKGLEWVAVISYDGSNKYYADSVKGRFTISRDNSKNTLYLQMNSLRAEDAVYYCARTSGYSSYFDYWGQGTLVTVSS

SEQ ID NO: 1415 - protein, 118 aa, Artificial Sequence
  Synthetic polypeptide
EVQLLESGGGLVQPGGSLRLSCAASGFTFSSYAMSWVRQAPGKGLEWVSAISGSGGSTYYADSVKGRFTISRDNSKNTLYLQMNSLRAEDAVYYCAKDPQGDLCFDYWGQGTLVTVSS

SEQ ID NO: 1416 - protein, 118 aa, Artificial Sequence
  Synthetic polypeptide
QVQLVQSGAEVKKPGASVKVSCKASGYTFTSYGISWVRQAPGQGLEWMGWISAYNGNTNYAQKLQGRVTMTTDTSTSTAYMELRSLRSDDAVYYCAREGFWSGYFDYWGQGTLVTVSS

SEQ ID NO: 1417 - protein, 118 aa, Artificial Sequence
  Synthetic polypeptide
QVQLVQSGAEVKKPGASVKVSCKASGYTFTSYGISWVRQAPGQGLEWMGWISAYNGNTNYAQKLQGRVTMTTDTSTSTAYMELRSLRSDDAVYYCASTLHYYYGMDVWGQGTTVTVSS

SEQ ID NO: 1418 - protein, 118 aa, Artificial Sequence
  Synthetic polypeptide
QVQLVESGGGVVQPGRSLRLSCAASGFTFSSYGMHWVRQAPGKGLEWVAVIWYDGSNKYYADSVKGRFTISRDNSKNTLYLQMNSLRAEDAVYYCARDGGYRYGMDVWGQGTTVTVSS

SEQ ID NO: 1419 - protein, 118 aa, Artificial Sequence
  Synthetic polypeptide
QVQLVESGGGVVQPGRSLRLSCAASGFTFSTSAMHWVRQAPGKGLEWVAVISYDGNNEYYADSVKGRFTISRDNSKNTLYLQMNSLRAEDAVYYCARGGASGWYFVYWGQGTLVTVSS

SEQ ID NO: 1420 - protein, 118 aa, Artificial Sequence
  Synthetic polypeptide
QVQLVESGGGVVQPGRSLRLSCAASGFTFSSYGMHWVRQAPGKGLEWVAVISYDGSNKYYADSVKGRFTISRDNSKNTLYLQMNSLRAEDAVYYCARTISYYYGMDVWGQGTTVTVSS

SEQ ID NO: 1421 - protein, 119 aa, Artificial Sequence
  Synthetic polypeptide
RVTLRESGPALVKPTQTLTLTCTFSGFSLSTSGMCVSWIRQPPGKALEWLARIDWDDDKYYSTSLKTRLTISKDTSKNQVVLTMTNMDPVDATYYCARMMAAMVIFDYWGQGTLVTVSS

SEQ ID NO: 1422 - protein, 118 aa, Artificial Sequence
  Synthetic polypeptide
QVQLVESGGGVVQPGRSLRLSCAASGFTFSSYGMHWVRQAPGKGLEWVAVIWYDGSNKYYADSVKGRFTISRDNSKNTLYLQMNSLRAEDAVYYCARAASVYYGMDVWGQGTTVTVSS

SEQ ID NO: 1423 - protein, 118 aa, Artificial Sequence
  Synthetic polypeptide
QVQLVESGGGVVQPGRSLRLSCAASGFTFSSYAMHWVRQAPGKGLEWVAVISYDGSNKYYADSVKGRFTISRDNSKNTLYLQMNSLRAEDAVYYCARGLRYFDWLAYWGQGTLVTVSS

SEQ ID NO: 1424 - protein, 118 aa, Artificial Sequence
  Synthetic polypeptide
QVQLVESGGGVVQPGRSLRLSCAASGFTFSSYGMHWVRQAPGKGLEWVAVIWYDGSNKYYADSVKGRFTISRDNSKNTLYLQMNSLRAEDAVYYCARDFGFGEPRDYWGQGTLVTVSS

SEQ ID NO: 1425 - protein, 118 aa, Artificial Sequence
  Synthetic polypeptide
QVQLVESGGGVVQPGRSLRLSCAASGFTFSSYGMHWVRQAPGKGLEWVAVISYDGSNKYYADSVKGRFTISRDNSKNTLYLQMNSLRAEDAVYYCSVYGYYYYGLDVWGQGTTVTVSS

SEQ ID NO: 1426 - protein, 118 aa, Artificial Sequence
  Synthetic polypeptide
EVQLLESGGGLVQPGGSLRLSCAASGFTFRSYAMNWVRQAPGKGLEWVSVFSGSGGVAYYADSVKGRFTVSRDDSKNTLYLQMNSLRAEDAVYYCAGTASYYYGMDVWGQGTTVTVSS

SEQ ID NO: 1427 - protein, 118 aa, Artificial Sequence
  Synthetic polypeptide
QVQLVESGGGVVQPGRSLRLSCAASGFTFSSYGMHWVRQAPGKGLEWVAVIWYDGSNKYYADSVKGRFTISRDNSKNTLYLQMNSLRAEDAVYYCASQVSIFYGMDVWGQGTTVTVSS

SEQ ID NO: 1428 - protein, 118 aa, Artificial Sequence
  Synthetic polypeptide
QVQLVESGGGVVQPGRSLRLSCAASGFTFSSYGMHWVRQAPGKGLEWVAVISYDGSNKYYADSVKGRFTISRDNSKNTLYLQMNSLRAEDAVYYCADSLLDYYGMDVWGQGTTVTVSS

SEQ ID NO: 1429 - protein, 118 aa, Artificial Sequence
  Synthetic polypeptide
QVQLVESGGGVVQPGRSLRLSCAASGFTFSSYGMHWVRQAPGKGLEWVAVIWYDGSNKYYADSVKGRFTISRDNSKNTLYLQMNSLRAEDAVYYCARDRGILYAFDIWGQGTMVTVSS

SEQ ID NO: 1430 - protein, 118 aa, Artificial Sequence
  Synthetic polypeptide
QVQLVESGGGVVQPGRSLRLSCAASGFTFSGYAMHWVRQAPGKGLEWVAVISYDGSNKYYADSVKGRFTISRDNSKNTLYLQMNSLRAEDAVYYCARTSGSYYYFDYWGQGTLVTVSS

SEQ ID NO: 1431 - protein, 118 aa, Artificial Sequence
  Synthetic polypeptide
EVQLVQSGAEVKKPGESLKISCKGSGYSFTSYWIGWVRQMPGKGLEWMGIIYPGDSDTRYSPSFQGQVTISADKSISTAYLQWSSLKASDAMYYCARLLPAASLFDYWGQGTLVTVSS

SEQ ID NO: 1432 - protein, 119 aa, Artificial Sequence
  Synthetic polypeptide
RVTLRESGPALVKPTQTLTLTCTFSGFSLSTSGMCVSWIRQPPGKALEWLARIDWDDDKYYSTSLKTRLTISKDTSKNQVVLTMTNMDPVDATYYCARILVGATKTDYWGQGTLVTVSS

SEQ ID NO: 1433 - protein, 118 aa, Artificial Sequence
  Synthetic polypeptide
QVQLVESGGGVVQPGRSLRLSCAASGFTFSSYAMHWVRQAPGKGLEWVAVISYDGSNKYYADSVKGRFTISRDNSKNTLYLQMNSLRAEDAVYYCARASGSYFTLDYWGQGTLVTVSS

SEQ ID NO: 1434 - protein, 118 aa, Artificial Sequence
  Synthetic polypeptide
QVQLVESGGGVVQPGRSLRLSCAASGFTFSSYGMHWVRQAPGKGLEWVAVIWYDGSNKYYADSVKGRFTISRDNSKNTLYLQMNSLRAEDAVYYCARDLRLGEEFDYWGQGTLVTVSS

SEQ ID NO: 1435 - protein, 118 aa, Artificial Sequence
  Synthetic polypeptide
QVQLVESGGGVVQPGRSLRLSCAASGFTFSSYGMHWVRQAPGKGLEWVAVIWYDGSNKYYADSVKGRFTISRDNSKNTLYLQMNSLRAEDAVYYCARDGGIAYACDYWGQGTLVTVSS

SEQ ID NO: 1436 - protein, 118 aa, Artificial Sequence
  Synthetic polypeptide
QVQLVESGGGVVQPGRSLRLSCAASGFTFSSYGMHWVRQAPGKGLEWVAVISYDGSNKYYADSVKGRFTISRDNSKNTLYLQMNSLRAEDAVYYCSGELLAYYGMDVWGQGTTVTVSS

SEQ ID NO: 1437 - protein, 118 aa, Artificial Sequence
  Synthetic polypeptide
QVQLVESGGGVVQPGRSLRLSCAASGFTFSSYGMHWVRQAPGKGLEWVAVIWYDGSNKYYADSVKGRFTISRDNSKNTLYLQMNSLRAEDAVYYCARDLSGWYGLDYWGQGTLVTVSS

SEQ ID NO: 1438 - protein, 119 aa, Artificial Sequence
  Synthetic polypeptide
QVQLVESGGGVVQPGRSLRLSCAASGFTFSSYGMHWVRQAPGKGLEWVAVIWYDGSNKYYADSVKGRFTISRDNSKNTLYLQMNSLRAEDAVYYCARDEHSSGWYFDYWGQGTLVTVSS

SEQ ID NO: 1439 - protein, 119 aa, Artificial Sequence
  Synthetic polypeptide
QVQLVESGGGVVQPGRSLRLSCAASGFTFSSYGMHWVRQAPGKGLEWVAVIWYDGSNKYYADSVKGRFTISRDNSKNTLYLQMNSLRAEDAVYYCARDGIVGATGLGYWGQGTLVTVSS

SEQ ID NO: 1440 - protein, 119 aa, Artificial Sequence
  Synthetic polypeptide
EVQLVQSGAEVKKPGESLKISCKGSGYSFTSYWIGWVRQMPGKGLEWMGIIYPGDSDTRYSPSFQGQVTISADKSISTAYLQWSSLKASDAMYYCARGPIAAAGLFDYWGQGTLVTVSS

SEQ ID NO: 1441 - protein, 120 aa, Artificial Sequence
  Synthetic polypeptide
QITLKESGPTLVKPTQTLTLTCTFSGFSLSTSGVGVGWIRQPPGKALEWLALIYWDDDKRYSPSLKSRLTITKDTSKNQVVLTVTNMDPVDATYYCAHLYYYYYYGMDVWGQGTTVTVSS

SEQ ID NO: 1442 - protein, 119 aa, Artificial Sequence
  Synthetic polypeptide
QVQLVQSGAEVKKPGASVKVSCKVSGYTLTELSMHWVRQAPGKGLEWMGGFDPEDGETIYAQKFQGRVTMTEDTSTDTAYMELSSLRSEDAVYYCATGSGSYLGWFDPWGQGTLVTVSS

SEQ ID NO: 1443 - protein, 119 aa, Artificial Sequence
  Synthetic polypeptide
QVQLVESGGGVVQPGRSLRLSCAASGFTFSSYGMHWVRQAPGKGLEWVAVIWYDGSNKYYADSVKGRFTISRDNSKNTLYLQMNSLRAEDAVYYCARDLIGGYYYMDVWGKGTTVTVSS

SEQ ID NO: 1444 - protein, 118 aa, Artificial Sequence
  Synthetic polypeptide
QVQLQQWGAGLLKPSETLSLTCAVYGGSFSGYYWSWIRQPPGKGLEWIGEINHSGSTNYNPSLKSRVTISVDTSKNQFSLKLSSVTAADAVYYCARVPLVYYYYMDVWGKGTTVTVSS

SEQ ID NO: 1445 - protein, 119 aa, Artificial Sequence
  Synthetic polypeptide
QVQLVESGGGVVQPGRSLRLSCAASGFTFSSYAMHWVRQAPGKGLEWVAVISYDGSNKYYADSVKGRFTISRDNSKNTLYLQMNSLRAEDAVYYCARGYSGSYSYFDYWGQGTLVTVSS

SEQ ID NO: 1446 - protein, 119 aa, Artificial Sequence
  Synthetic polypeptide
QVQLVESGGGVVQPGRSLRLSCAASGFTFSSYGMHWVRQAPGKGLEWVAVIWYDGSNKYYADSVKGRFTISRDNSKNTLYLQMNSLRAEDAVYYCASQLAPYYYGMDVWGQGTTVTVSS

SEQ ID NO: 1447 - protein, 119 aa, Artificial Sequence
  Synthetic polypeptide
QVQLVESGGGVVQPGRSLRLSCAASGFTFGSYGMHWVRQAPGKGLEWVAVIWYDGRNKYYIDSVKGRFTISRDNSRNMLYLQMSSLRAEDAVYYCARDLRRYYYGMDVWGEGTTVTVSS

SEQ ID NO: 1448 - protein, 119 aa, Artificial Sequence
  Synthetic polypeptide
EVQLVESGGGLVQPGGSLRLSCAASGFTFSSYWMSWVRQAPGKGLEWVANIKQDGSEKYYVDSVKGRFTISRDNAKNSLYLQMNSLRAEDAVYYCARGGIAVAGFFDYWGQGTLVTVSS

SEQ ID NO: 1449 - protein, 118 aa, Artificial Sequence
  Synthetic polypeptide
QVQLQESGPGLVKPSETLSLTCTVSGGSISSYYWSWIRQPPGKGLEWIGYIYYSGRTNYNPSLKSRVTMSVDTSKNQFSLSLSSVTAADAVYYCARVHSSSWYYFDYWGQGTLLTVSS

SEQ ID NO: 1450 - protein, 119 aa, Artificial Sequence
  Synthetic polypeptide
EVQLVESGGGLVQPGRSLRLSCAASGFTFDDYAMHWVRQAPGKGLEWVSGISWNSGSIGYADSVKGRFTISRDNAKNSLYLQMNSLRAEDALYYCAKDYYGSGSYFDYWGQGTLVTVSS

SEQ ID NO: 1451 - protein, 119 aa, Artificial Sequence
  Synthetic polypeptide
QVQLVESGGGVVQPGRSLRLSCAASGFTFSSYAMHWVRQAPGKGLEWVAVISYDGSNKYYADSVKGRFTISRDNSKNTLYLQMNSLRAEDAVYYCARGSGSYYGPFDYWGQGTLVTVSS

SEQ ID NO: 1452 - protein, 120 aa, Artificial Sequence
  Synthetic polypeptide
QITLKESGPTLVKPTQTLTLTCTFSGFSLSTSGVGVGWIRQPPGKALEWLALIYWDDDKRYSPSLKSRLTITKDTSKNQVVLTMTNMDPVDATYYCAHAGLYYYYGMDVWGQGTTVTVSS

SEQ ID NO: 1453 - protein, 119 aa, Artificial Sequence
  Synthetic polypeptide
QVQLVESGGGVVQPGRSLRLSCAASGFTFSSYGMHWVRQAPGKGLEWVAVIWYDGSNKYYADSVKGRFTISRDNSKNTLYLQMNSLRAEDAVYYCARDLAVAGTGEDYWGQGTLVTVSS

SEQ ID NO: 1454 - protein, 119 aa, Artificial Sequence
  Synthetic polypeptide
QVQLVESGGGVVQPGRSLRLSCAASGFTFSSYGMHWVRQAPGKGLEWVAVIWYDGSNKYYADSVKGRFTISRDNSKNTLYLQMNSLRAEDAVYYCARHDYYYYYYMDVWGKGTTVTVSS

SEQ ID NO: 1455 - protein, 119 aa, Artificial Sequence
  Synthetic polypeptide
QVQLVESGGGVVQPGRSLRLSCAASGFTFSSYAMHWVRQAPGKGLEWVAVISYDGSNKYYADSVKGRFTISRDNSKNTLYLQMNSLRAEDAVYYCARDNSGYSFQFDYWGQGTLVTVSS

SEQ ID NO: 1456 - protein, 119 aa, Artificial Sequence
  Synthetic polypeptide
QVQLVESGGGVVQPGRSLRLSCAASGFTFSSYAMHWVRQAPGKGLEWVAVISYDGSNKYYADSVKGRFTISRDNSKNTLYLQMNSLRAEDAVYYCAREQIAVGDAFDIWGQGTMVTVSS

SEQ ID NO: 1457 - protein, 119 aa, Artificial Sequence
  Synthetic polypeptide
QVQLVESGGGVVQPGRSLRLSCAASGFTFSSYAMHWVRQAPGKGLEWVAVISYDGSNKYYADSVKGRFTISRDNSKNTLYLQMNSLRAEDAVYYCARQLVLLYYGMDVWGQGTTVTVSS

SEQ ID NO: 1458 - protein, 119 aa, Artificial Sequence
  Synthetic polypeptide
QMQLVQSGPEVKKPGTSVKVSCKASGFTFTSSAVQWVRQARGQRLEWIGWIVVGSGNTNYAQKFQERVTITRDMSTSTAYMELSSLRSEDAVYYCAADSSGYYDAFDIWGQGTMVTVSS

SEQ ID NO: 1459 - protein, 119 aa, Artificial Sequence
  Synthetic polypeptide
QVQLVESGGGVVQPGRSLRLSCAASGFTFSSYAMHWVRQAPGKGLEWVAVISYDGSNKYYADSVKGRFTISRDNSKNTLYLQMNSLRAEDAVYYCARDPVAVAGPLDYWGQGTLVTVSS

SEQ ID NO: 1460 - protein, 119 aa, Artificial Sequence
  Synthetic polypeptide
EVQLVESGGGLVKPGGSLRLSCAASGFTFSSYSMNWVRQAPGKGLEWVSSISSSSSYIYYADSVNGRFTISRDNAKNSLYLQMNSLRAEDAVYYCASPRGYSYDYFDYWGQGTLVTVSS

SEQ ID NO: 1461 - protein, 119 aa, Artificial Sequence
  Synthetic polypeptide
EVQLVESGGGLVQPGGSLRLSCAASGFTFSSYWMSWVRQAPGKGLEWVANIKQDGSEKYYVDSVKGRFTISRDNAKNSLYLQMNSLRAEDAVYYCARVCFGELLPIDYWGQGTLLTVSS

SEQ ID NO: 1462 - protein, 119 aa, Artificial Sequence
  Synthetic polypeptide
QVQLVESGGGVVQPGRSLRLSCAASGFTFSSYAMHWVRQAPGKGLEWVAVISYDGSNKYYADSVKGRFTISRDNSKNTLYLQMNSLRAEDAVYYCARNLDYYYYGMDVWGQGTTVTVSS

SEQ ID NO: 1463 - protein, 119 aa, Artificial Sequence
  Synthetic polypeptide
QVQLVESGGGVVQPGRSLRLSCAASGFTFSSYAMHWVRQAPGKGLEWVAVISYDGSNKYYADSVKGRFTISRDNSKNTLYLQMNSLRAEDAVYYCARDLGGYSFYFDYWGQGTLVTVSS

SEQ ID NO: 1464 - protein, 119 aa, Artificial Sequence
  Synthetic polypeptide
QVQLVESGGGVVQPGRSLRLSCAASGFTFSSYAMHWVRQAPGKGLEWVAVISYDGSNKYYADSVKGRFTISRDNSKNTLYLQMNSLRAEDAVYYCARELVAGYYGMDVWGQGTTVTVSS

SEQ ID NO: 1465 - protein, 119 aa, Artificial Sequence
  Synthetic polypeptide
QVQLVESGGGVVQPGRSLRLSCAASGFTFSSYGMHWVRQAPGKGLEWVAVIWYDGSNKYYADSVKGRFTISRDNSKNTLYLQMNSLRAEDAVYYCARDRRGYSYGFDYWGQGTLVTVSS

SEQ ID NO: 1466 - protein, 119 aa, Artificial Sequence
  Synthetic polypeptide
QVQLVESGGGVVQPGRSLRLSCAASGFTFSSYAMHWVRQAPGKGLEWVAVISYDGSNKYYADSVKGRFTISRDNSKNTLYLQMNSLRAEDAVYYCARDDSGYYYYMDVWGKGTTVTVSS

SEQ ID NO: 1467 - protein, 119 aa, Artificial Sequence
  Synthetic polypeptide
QVQLVESGGGVVQPGRSLRLSCAASGFTFSSYAMHWVRQAPGKGLEWVAVISYDGSNKYYADSVKGRFTISRDNSKNTLYLQMNSLRAEDAVYYCARVLVVNYYGMDVWGQGTTVTVSS

SEQ ID NO: 1468 - protein, 119 aa, Artificial Sequence
  Synthetic polypeptide
EVQLLESGGGLVQPGGSLRLSCAASGFTFSSYAMSWVRQAPGKGLEWVSAISGSGGSTYYADSVKGRFTISRDNSKNTLYLQMNSLRAEDAVYYCAKTGGIAAAGFDYWGQGTLVTVSS

SEQ ID NO: 1469 - protein, 119 aa, Artificial Sequence
  Synthetic polypeptide
QVQLVQSGAEVKKPGASVKVSCKASGYTFTSYGISWVRQAPGQGLEWMGWISAYNGNTNYAQKLQGRVTMTTDTSTSTAYMELRSLRSDDAVYYCARGYDILTGWVDYWGQGTLVTVSS

SEQ ID NO: 1470 - protein, 119 aa, Artificial Sequence
  Synthetic polypeptide
QVQLVESGGGVVQPGRSLRLSCAASGFTFSSYAMHWVRQAPGKGLEWVAVISYDGSNKYYADSVKGRFTISRDNSKNTLYLQMNSLRAEDAVYYCARDRTDSSGYFDYWGQGTLVTVSS

SEQ ID NO: 1471 - protein, 119 aa, Artificial Sequence
  Synthetic polypeptide
QVQLVESGGGVVQPGRSLRLSCAASGFTFSTYAMHWVRQAPGKGLEWVAVISYDGSNKYYAHSVKGRFTISRDNSKNTLYLQMDTLRAEDAVYYCARGGGSYFSAFDIWGQGTMVTVSS

SEQ ID NO: 1472 - protein, 119 aa, Artificial Sequence
  Synthetic polypeptide
QVQLVESGGGVVQPGRSLRLSCAASGFTFSSNGMHWVRQAPGKGLEWVAVIWYDGSKKYYADSVKGRFTISRDNSKYTLDLQMNSLRAEDAVYYCARDLRLGPYGMDVWGQGTTVTVSS

SEQ ID NO: 1473 - protein, 119 aa, Artificial Sequence
  Synthetic polypeptide
EVQLVESGGGLVQPGGSLRLSCAASGFTFSSYWMSWVRQAPGKGLEWVANIKQDGSEKYYVDSVKGRFTISRDNAKNSLYLQMNSLRAEDAVYYCARDLYGYSYGEDYWGQGTLVTVSS

SEQ ID NO: 1474 - protein, 119 aa, Artificial Sequence
  Synthetic polypeptide
QVQLVESGGGVVQPGRSLRLSCAASGFTFSSYAMHWVRQAPGKGLEWVAVISYDGSNKYYADSVKGRFTISRDNSKNTLYLQMNSLRAEDAVYYCARGGGSYFHWFDPWGQGTLVTVSS

SEQ ID NO: 1475 - protein, 119 aa, Artificial Sequence
  Synthetic polypeptide
QVQLVESGGGVVQPGRSLRLSCAASGFTFSSYGMHWVRQAPGKGLEWVAVISYDGSNKYYADSVKGRFTISRDNSKNTLYLQMNSLRAEDAVYYCARLSSGYYSPFDYWGQGTLVTVSS

SEQ ID NO: 1476 - protein, 119 aa, Artificial Sequence
  Synthetic polypeptide
QVQLVESGGGVVQPGRSLRLSCAASGFTFSSYGMHWVRQAPGKGLEWVAVIWYDGSNKYYADSVKGRFTISRDNSKNTLYLQMNSLRAEDAVYYCAREEQWPRGGFDYWGQGTLVTVSS

SEQ ID NO: 1477 - protein, 119 aa, Artificial Sequence
  Synthetic polypeptide
EVQLVESGGGLVQPGGSLRLSCAASGFTFSSYWMHWVRQAPGKGLVWVSRINSDGSSTSYADSVKGRFTISRDNAKNTLYLQMNSLRAEDAVYYCAREDIVATIQFDYWGQGTLVTVSS

SEQ ID NO: 1478 - protein, 119 aa, Artificial Sequence
  Synthetic polypeptide
QVQLVESGGGVVQPGRSLRLSCAASGFTFSSYGMHWVRQAPGKGLEWVAVIWYDGSNKYYADSVKGRFTISRDNSKNTLYLQMNSLRAEDAVYYCAREGEVGATGVDYWGQGTLVTVSS

SEQ ID NO: 1479 - protein, 119 aa, Artificial Sequence
  Synthetic polypeptide
QVQLVESGGGVVQPGRSLRLSCAASGFTFSSYGMHWVRQAPGKGLEWVAVIWYDGSNKYYADSVKGRFTISRDNSKNTLYLQMNSLRAEDAVYYCARDLVGRLYYFDYWGQGTLVTVSS

SEQ ID NO: 1480 - protein, 119 aa, Artificial Sequence
  Synthetic polypeptide
QVQLVESGGGLVKPGGSLRLSCAASGFTFSDYYMSWIRQAPGKGLEWVSYISSSGSTIYYADSVKGRFTISRDNAKNSLYLQMNSLRAEDAVYYCARGDFWSGFYMDVWGKGTTVTVSS

SEQ ID NO: 1481 - protein, 119 aa, Artificial Sequence
  Synthetic polypeptide
QVQLVESGGGVVQPGRSLRLSCAASGFTFSSYGMHWVRQAPGKGLEWVAVIWYDGSNKYYADSVKGRFTISRDNSKNTLYLQMNSLRAEDAVYYCARDFRFGESDTDYWGQGTLVTVSS

SEQ ID NO: 1482 - protein, 119 aa, Artificial Sequence
  Synthetic polypeptide
QVQLVESGGGVVQPGRSLRLSCAASGFTFSSYGMHWVRQAPGKGLEWVAVIWYDGSNKYYADSVKGRFTISRDNSKNTLYLQMNSLRAEDAVYYCAREVAAPYNWFDPWGQGTLVTVSS

SEQ ID NO: 1483 - protein, 119 aa, Artificial Sequence
  Synthetic polypeptide
QVQLVESGGGVVQPGRSLRLSCAASGFTFSSYGMHWVRQAPGKGLEWVAVIWYDGSNKYYADSVKGRFTISRDNSKNTLYLQMNSLRAEDAVYYCARDGGYSYGDFDYWGQGTLVTVSS

SEQ ID NO: 1484 - protein, 119 aa, Artificial Sequence
  Synthetic polypeptide
QVQLVESGGGVVQPGRSLRLSCAASGFTFSSYAMHWVRQAPGKGLEWVAVISYDGSNKYYADSVKGRFTISRDNSKNTLYLQMNSLRAEDAVYYCARAGSGSYTWFDPWGQGTLVTVSS

SEQ ID NO: 1485 - protein, 119 aa, Artificial Sequence
  Synthetic polypeptide
QVQLVESGGGVVQPGRSLRLSCAASGFTFSSYAMHWVRQAPGKGLEWVAVISYDGSNKYYADSVKGRFTISRDNSKNTLYLQMNSLRAEDAVYYCARDGSGLYYGMDVWGQGTTVTVSS

SEQ ID NO: 1486 - protein, 120 aa, Artificial Sequence
  Synthetic polypeptide
RVTLRESGPALVKPTQTLTLTCTFSGFSLSTSGMCVSWIRQPPGKALEWLARIDWDDDKYYSTSLKTRLTISKDTSKNQVVLTMTNMDPVDATYYCARELMVRGVIFDYWGQGTLVTVSS

SEQ ID NO: 1487 - protein, 119 aa, Artificial Sequence
  Synthetic polypeptide
EVQLVESGGGLVQPGGSLRLSCAASGFTFSSYWMHWVRQAPGKGLVWVSRINSDGSSTSYADSVKGRFTISRDNAKNTLYLQMNSLRAEDAVYYCAREGIVVVPEFDYWGQGTLVTVSS

SEQ ID NO: 1488 - protein, 120 aa, Artificial Sequence
  Synthetic polypeptide
QITLKESGPTLVKPTQTLTLTCTFSGFSLSTSGVGVGWIRQPPGKALEWLALIYWDDDKRYSPSLKSRLTITKDTSKNQVVLTMTNMDPVDATYYCAHRRGIAAAYFDYWGQGTLVTVSS

SEQ ID NO: 1489 - protein, 119 aa, Artificial Sequence
  Synthetic polypeptide
QVQLVESGGGVVQPGRSLRLSCAASGFTFSSYAMHWVRQAPGKGLEWVAVISYDGSNKYYADSVKGRFTISRDNSKNTLYLQMNSLRAEDAVYYCARDGVGSYSYFDYWGQGTLVTVSS

SEQ ID NO: 1490 - protein, 119 aa, Artificial Sequence
  Synthetic polypeptide
QVQLVESGGGVVQPGRSLRLSCAASGFTFSSYGMHWVRQAPGKGLEWVAVISYDGSNKYYADSVKGRFTISRDNSKNTLYLQMNSLRAEDAVYYCAKAVDIVATIPDYWGQGTLVTVSS

SEQ ID NO: 1491 - protein, 119 aa, Artificial Sequence
  Synthetic polypeptide
QVQLVESGGGVVQPGRSLRLSCAASGFTFSSYGMHWVRQAPGKGLEWVAVISYDGSNKYYADSVKGRFTISRDNSKNTLYLQMNSLRAEDAVYYCAKDPSAVAGPLDYWGQGTLVTVSS

SEQ ID NO: 1492 - protein, 119 aa, Artificial Sequence
  Synthetic polypeptide
EVQLVESGGGLVQPGGSLRLSCAASGFTFSSYWMHWVRQAPGKGLVWVSRINSDGSSTSYADSVKGRFTISRDNAKNTLYLQMNSLRAEDAVYYCARDYYYDSSGFSLWGQGTLVTVSS

SEQ ID NO: 1493 - protein, 119 aa, Artificial Sequence
  Synthetic polypeptide
EVQLVQSGAEVKKPGESLKISCKGSGYSFTSYWIGWVRQMPGKGLEWMGIIYPGDSDTRYSPSFQGQVTISADKSISTAYLQWSSLKASDAMYYCARQICGGDCPFDYWGQGTLVTVSS

SEQ ID NO: 1494 - protein, 119 aa, Artificial Sequence
  Synthetic polypeptide
QVQLVESGGGVVQPGRSLRLSCAASGFTFSSYGMHWVRQAPGKGLEWVAVIWYDGSNKYYADSVKGRFTISRDNSKNTLYLQMNSLRAEDAVYYCARDKGFGELEGDYWGQGTLVTVSS

SEQ ID NO: 1495 - protein, 119 aa, Artificial Sequence
  Synthetic polypeptide
QVQLVESGGGVVQPGRSLRLSCAASGFTFSSYAMHWVRQAPGKGLEWVAVISYDGSNKYYADSVKGRFTISRDNSKNTLYLQMNSLRAEDAVYYCASALLWFGEPLDYWGQGTLVTVSS

SEQ ID NO: 1496 - protein, 119 aa, Artificial Sequence
  Synthetic polypeptide
QVQLVESGGGVVQPGRSLRLSCAASGFTFSSYGMHWVRQAPGKGLEWVAVISYDGSNKYYADSVKGRFTISRDNSKNTLYLQMNSLRAEDAVYYCAKGGGSYYDPFDYWGQGTLVTVSS

SEQ ID NO: 1497 - protein, 118 aa, Artificial Sequence
  Synthetic polypeptide
QVQLQQWGAGLLKPSETLSLTCAVYGGSFSGYYWSWIRQPPGKGLEWIGEINHSGSTNYNPSLKSRVTISVDTSKNQFSLKLSSVTAADAVYYCARGYGDYVPNFDYWGQGTLVTVSS

SEQ ID NO: 1498 - protein, 119 aa, Artificial Sequence
  Synthetic polypeptide
QVQLVESGGGVVQPGRSLRLSCAASGFTFSSYAMHWVRQAPGKGLEWVAVISYDGSNKYYADSVKGRFTISRDNSKNTLYLQMNSLRAEDAVYYCARGSGSYLVYFDYWGQGTLVTVSS

SEQ ID NO: 1499 - protein, 119 aa, Artificial Sequence
  Synthetic polypeptide
QVQLVESGGGVVQPGRSLRLSCAASGFTFSSYAMHWVRQAPGKGLEWVAVISYDGSNKYYADSVKGRFTISRDNSKNTLYLQMNSLRAEDAVYYCARALKGGYNWFDPWGQGTLVTVAS

SEQ ID NO: 1500 - protein, 119 aa, Artificial Sequence
  Synthetic polypeptide
QVQLVESGGGVVQPGRSLRLSCAASGFTFSSYAMHWVRQAPGKGLEWVAVISYDGSNKYYADSVKGRFTISRDNSKNTLYLQMNSLRAEDAVYYCARNYYDSSDAFDIWGQGTMVTVSS

SEQ ID NO: 1501 - protein, 119 aa, Artificial Sequence
  Synthetic polypeptide
QVQLVESGGGVVQPGRSLRLSCAASGFTFSSYGMHWVRQAPGKGLEWVAVIWYDGSNKYYADSVKGRFTISRDNSKNTLYLQMNSLRAEDAVYYCARDHGGWSYYFDYWGQGTLVTVSS

SEQ ID NO: 1502 - protein, 119 aa, Artificial Sequence
  Synthetic polypeptide
QVQLVESGGGVVQPGRSLRLSCAASGFTFSSYGMHWVRQAPGKGLEWVAVIWYDGSNKYYADSVKGRFTISRDNSKNTLYLQMNSLRAEDAVYYCAREGYYDSRSLDYWGQGTLVTVSS

SEQ ID NO: 1503 - protein, 119 aa, Artificial Sequence
  Synthetic polypeptide
QVQLVESGGGVVQPGRSLRLSCAASGFTFSSYAMHWVRQAPGKGLEWVAVISYDGSNKYYADSVKGRFTISRDNSKNTLYLQMNSLRAEDAVYYCARGEVVAAYYFDYWGQGTLVTVSS

SEQ ID NO: 1504 - protein, 119 aa, Artificial Sequence
  Synthetic polypeptide
EVQLLESGGGLVQPGGSLRLSCAASGFTFSSYAMSWVRQAPGKGLEWVSAISGSGGSTYYADSVKGRFTISRDNSKNTLYLQMNSLRAEDAVYYCASPRGYSYGAFDYWGQGTLVTVSS

SEQ ID NO: 1505 - protein, 119 aa, Artificial Sequence
  Synthetic polypeptide
QVQLVESGGGVVQPGRSLRLSCAASGFTFSSYAMHWVRQAPGKGLEWVAVISYDGSNKYYADSVKGRFTISRDNSKNTLYLQMNSLRAEDAVYYCARDKSGYSYGADYWGQGTLVTVSS

SEQ ID NO: 1506 - protein, 119 aa, Artificial Sequence
  Synthetic polypeptide
QVQLVESGGGVVQPGRSLRLSCAASGFTFSSYGMHWVRQAPGKGLEWVAVIWYDGSNKYYADSVKGRFTISRDNSKNTLYLQMNSLRAEDAVYYCARDLRLGELSFPYWGQGTLVTVSS

SEQ ID NO: 1507 - protein, 119 aa, Artificial Sequence
  Synthetic polypeptide
QVQLVESGGGVVQPGRSLRLSCAASGFTFSSYAMHWVRQAPGKGLEWVAVISYDGSNKYYADSVKGRFTISRDNSKNTLYLQMNSLRAEDAVYYCARGGGGSYYFVDYWGQGTLVTVSS

SEQ ID NO: 1508 - protein, 119 aa, Artificial Sequence
  Synthetic polypeptide
QVQLVESGGGVVQPGRSLRLSCAASGFTFSSYGMHWVRQAPGKGLEWVAVIWYDGSNKYYADSVKGRFTISRDNSKNTLYLQMNSLRAEDAVYYCARDGMGPYYYMDVWGKGTTVTVSS

SEQ ID NO: 1509 - protein, 119 aa, Artificial Sequence
  Synthetic polypeptide
EVQLVESGGGLVQPGGSLRLSCAASGFTFSSYWMHWVRQAPGKGLVWVSRINSDGSSTSYADSVKGRFTISRDNAKNTLYLQMNSLRAEDAVYYCAREGVGATIYFDYWGQGTLVTVSS

SEQ ID NO: 1510 - protein, 119 aa, Artificial Sequence
  Synthetic polypeptide
QVQLVESGGGVVQPGRSLRLSCAASGFTFSSYGMHWVRQAPGKGLEWVAVIWYDGSNKYYADSVKGRFTISRDNSKNTLYLQMNSLRAEDAVYYCARDLRGSWYGMDVWGQGTTVTVSS

SEQ ID NO: 1511 - protein, 119 aa, Artificial Sequence
  Synthetic polypeptide
QVQLVESGGGVVQPGRSLRLSCAASGFTFSSYGMHWVRQAPGKGLEWVAVIWYDGSNKYYADSVKGRFTISRDNSKNTLYLQMNSLRAEDAVYYCAGELLPFYYGMDVWGQGTTVTVSS

SEQ ID NO: 1512 - protein, 119 aa, Artificial Sequence
  Synthetic polypeptide
QVQLVESGGGVVQPGRSLRLSCAASGFTFSSYAMHWVRQAPGKGLEWVEVISYDGSNKYYADSVKGRFTISRDNSKNTLYLQMNSLRAEDAVYYCARGFGGYYSPFDYWGQGTLVTVSS

SEQ ID NO: 1513 - protein, 120 aa, Artificial Sequence
  Synthetic polypeptide
RVTLRESGPALVKPTQTLTLTCTFSGFSLSTSGMCVSWIRQPPGKALEWLARIDWDDDKYYSTSLKTRLTISKDTSKNQVVLTMTNMDPVDATYYCARVNMVRGVIIDYWGQGTLVTVSS

SEQ ID NO: 1514 - protein, 119 aa, Artificial Sequence
  Synthetic polypeptide
EVQLVESGGGLVKPGGSLRLSCAASGFTFSSYSMNWVRQAPGKGLEWVSSISSSSSYIYYADSVKGRFTISRDNAKNSLYLQMNSLRAEDAVYYCAGATYYYYYGMDVWGQGTTVTVSS

SEQ ID NO: 1515 - protein, 119 aa, Artificial Sequence
  Synthetic polypeptide
QVQLVESGGGVVQPGRSLRLSCAASGFTFSSYGMHWVRQAPGKGLEWVAVIWYDGSNEYYADSVKGRFTISRDNSKNTLYLQMNSLRTEDAVYYCAREGAIAVAGLDYWGQGTLVTVSS

SEQ ID NO: 1516 - protein, 121 aa, Artificial Sequence
  Synthetic polypeptide
EVQLVESGGGLVQPGRSLRLSCTASGFNFGDYAMSWVRQAPGKGLEWVGFIRSKAYGGTTEYAASVKGRFTISRDDSKSIAYLQMNSLKTEDAVYYCTRLDFWSCYYFDYWGQGTWVTVSS

SEQ ID NO: 1517 - protein, 119 aa, Artificial Sequence
  Synthetic polypeptide
QVQLVESGGGVVQPGRSLRLSCAASGFTFSSYAMHWVRQAPGKGLEWVAVISYDGSNKYYADYVKGRFSISRDNSKNTLYLQMNSLRAEDAVYYCARGLGGNYYGMDVWGQGTTVTVSS

SEQ ID NO: 1518 - protein, 119 aa, Artificial Sequence
  Synthetic polypeptide
EVQLVQSGAEVKKPGESLKISCKGSGYSFTSYWIGWVRQMPGKGLEWMGIIYPGDSDTRYSPSFQGQVTISADKSISTAYLQWSSLKASDAMYYCARGLAAAAGTFDYWGQGTLVTVSS

SEQ ID NO: 1519 - protein, 120 aa, Artificial Sequence
  Synthetic polypeptide
QVQLVESGGGVVQPGRSLRLSCAASGFTFSSYAMHWVRQAPGKGLEWVAVISYDGSNKYYADSVKGRFTISRDNSKNTLYLQMNSLRAEDAVYYCARPYSGSYRGYFDYWGQGTLVTVSS

SEQ ID NO: 1520 - protein, 120 aa, Artificial Sequence
  Synthetic polypeptide
QVQLVESGGGVVQPGRSLRLSCAASGFTFSTYAMHWVRQAPGKGLEWVAVISFDGRNKYYADSVKGRFTISRDNSKNTLDLQMNSLRPEDALYFCARPYTGSYSSWFDPWGRGTLVTVSS

SEQ ID NO: 1521 - protein, 120 aa, Artificial Sequence
  Synthetic polypeptide
QVQLVESGGGVVQPGRSLRLSCAASGFTFSSYAMHWVRQAPGKGLEWVAVISYDGSNKYYADSVKGRFTISRDNSKNTLYLQMNSLRAEDAVYYCARDQSGSYLGPFDYWGQGTLVTVSS

SEQ ID NO: 1522 - protein, 120 aa, Artificial Sequence
  Synthetic polypeptide
QVQLVESGGGVVQPGRSLRLSCAASGFTFSSYAMHWVRQAPGKGLEWVAVISYDGSNKYYADSVKGRFTISRDNSKNTLYLQMNSLRAEDAVYYCARAYSGSYSSYFDYWGQGTLVTVSS

SEQ ID NO: 1523 - protein, 120 aa, Artificial Sequence
  Synthetic polypeptide
QVQLVESGGGVVQPGRSLRLSCAASGFTFSSYAMHWVRQAPGKGLEWVAVISYDGSNKYYADSVKGRFTISRDNSKNTLYLQMNSLRAEDAVYYCARSRGGSYSDAFDIWGQGTMVTVSS

SEQ ID NO: 1524 - protein, 120 aa, Artificial Sequence
  Synthetic polypeptide
QVQLVESGGGVVQPGRSLRLSCAASGFTFSSYAMHWVRQAPGKGLEWVAVISYDGSNKYYADSVKGRFTISRDNSKNTLYLQMNSLRAEDAVYYCARPISGSYFSSFDYWGQGTLVTVSS

SEQ ID NO: 1525 - protein, 120 aa, Artificial Sequence
  Synthetic polypeptide
QVQLVESGGGVVQPGRSLRLSCAASGFTFSSYAMHWVRQAPGKGLEWVAVISYDGSNKYYADSVKGRFTISRDNSKNTLYLQMNSLRAEDAVYYCARDNSGSYYGAFDIWGQGTMVTVSS

SEQ ID NO: 1526 - protein, 120 aa, Artificial Sequence
  Synthetic polypeptide
QVQLVESGGGVVQPGRSLRLSCAASGFTFSSYAMHWVRQAPGKGLEWVAVISYDGSNKYYADSVKGRFTISRDNSKNTLYLQMNSLRAEDAVYYCARGYSGSYLYGMDVWGQGTTVTVSS

SEQ ID NO: 1527 - protein, 120 aa, Artificial Sequence
  Synthetic polypeptide
QVQLVESGGGVVQPGRSLRLSCAASGFTFSSYAMHWVRQAPGKGLEWVGVISYDGINKYYADSVKGRFTISRDNSKHTLYLQMNSLRAEDAIYYCARALGGNYYYGLDVWGQGTTVTVSS

SEQ ID NO: 1528 - protein, 120 aa, Artificial Sequence
  Synthetic polypeptide
QVQLVESGGGVVQPGRSLRLSCAASGFTFSSYAMHWVRQAPGKGLEWVAVISYDGSNKYYADSVKGRFTISRDNSKNTLYLQMNSLRAEDAVYYCARTYSGSYLSAFDIWGQGTMVTVSS

SEQ ID NO: 1529 - protein, 120 aa, Artificial Sequence
  Synthetic polypeptide
QVQLVESGGGVVQPGRSLRLSCAASGFTFSSYAMHWVRQAPGKGLEWVAVISYDGSNKYYADSVKGRFTISRDNSKNTLYLQMNSLRAEDAVYYCARVGSGSYLYYFDYWGQGTLVTVSS

SEQ ID NO: 1530 - protein, 120 aa, Artificial Sequence
  Synthetic polypeptide
QVQLVQSGAEVKKPGASVKVSCKVSGYTLTELSMHWVRQAPGKGLEWMGGFDPEDGETIYAQKFQGRVTMTEDTSTDTAYMELSSLRSEDAVYYCATGPAVAGTGWFDPWGQGTLVTVSS

SEQ ID NO: 1531 - protein, 120 aa, Artificial Sequence
  Synthetic polypeptide
QVQLVESGGGVVQPGRSLRLSCAASGFTFSSYAMHWVRQAPGKGLEWVAVISYDGSNKYYADSVKGRFTISRDNSKNTLYLQMNSLRAEDAVYYCARAGSGSYRGFFDPWGQGTLVTVSS

SEQ ID NO: 1532 - protein, 120 aa, Artificial Sequence
  Synthetic polypeptide
QVQLVQSGAEVKKPGASVKVSCKVSGYTLTELSMHWVRQAPGKGLEWMGGFDPEDGETIYAQKFQGRVTMTEDTSTDTAYMELSSLRSEDAVYYCATGAAAGTFNWFDPWGQGTLVTVSS

SEQ ID NO: 1533 - protein, 120 aa, Artificial Sequence
  Synthetic polypeptide
QVQLVESGGGVVQPGRSLRLSCAASGFTFSSYAMHWVRQAPGKGLEWVAVISYDGSNKYYADSVKGRFTISRDNSKNTLYLQMNSLRAEDAVYYCARSRGGSYYGGFDYWGQGTLVTVSS

SEQ ID NO: 1534 - protein, 120 aa, Artificial Sequence
  Synthetic polypeptide
QVQLVESGGGVVQPGRSLRLSCAASGFPFSSFAMHWVRQAPGKGLEWVALISYDGGNKYYADSVKGRITMSRDNSKNTLYLQMNSLRAEDAVYYCARATIGTYYYGMDVWGQGTTVTVSS

SEQ ID NO: 1535 - protein, 121 aa, Artificial Sequence
  Synthetic polypeptide
QITLKESGPTLVKPTQTLTLTCTFSGFSLSTSGVGVGWIRQPPGKALEWLALIYWDDDKRYSPSLKSRLTITKDTSKNQVVLTMTNMDPVDATYYCAHRPGDFWSGYFDYWGQGTLVTVSS

SEQ ID NO: 1536 - protein, 120 aa, Artificial Sequence
  Synthetic polypeptide
QVQLVESGGGVVQPGRSLRLSCAASGFTFSSYAMHWVRQAPGKGLEWVAVISYDGSNKYYADSVKGRFTISRDNSKNTLYLQMNSLRAEDAVYYCARGYSGSYLSAFDIWGQGTMVTVSS

SEQ ID NO: 1537 - protein, 120 aa, Artificial Sequence
  Synthetic polypeptide
EVQLVESGGGLVKPGGSLRLSCAASGFTFSSYSMNWVRQAPGKGLEWVSSISSSSSYIYYADSVKGRFTISRDNAKNSLYLQMNSLRAEDAVYYCARFSPYYYYYGMDVWGQGTTVTVSS

SEQ ID NO: 1538 - protein, 120 aa, Artificial Sequence
  Synthetic polypeptide
QVQLVESGGGVVQPGRSLRLSCAASGFTFSSYAMHWVRQAPGKGLEWVAVISYDGSNKYYADSVKGRFTISRDNSKNTLYLQMNSLRAEDAVYYCARPRRGSYFDAFDIWGQGTMVTVSS

SEQ ID NO: 1539 - protein, 120 aa, Artificial Sequence
  Synthetic polypeptide
QVQLVESGGGVVQPGRSLRLSCAASGFTFSSYAMHWVRQAPGKGLEWVAVISYDGSNKYYADSVKGRFTISRDNSKNTLYLQMNSLRAEDAVYYCARGHSGSYLAAFDIWGQGTMVTVSS

SEQ ID NO: 1540 - protein, 120 aa, Artificial Sequence
  Synthetic polypeptide
QVQLVESGGGVVQPGRSLRLSCAASGFTFSSYAMHWVRQAPGKGLEWVAVISYDGSNKYYADSVKGRFTISRDNSKNTLYLQMNSLRAEDAVYYCARPGAGSYLYYFDYWGQGTLVTVSS

SEQ ID NO: 1541 - protein, 120 aa, Artificial Sequence
  Synthetic polypeptide
QVQLVQSGAEVKKPGASVKVSCKVSGYTLTELSMHWVRQAPGKGLEWMGGFDPEDGETIYAQKFQGRVTMTEDTSTDTAYMELSSLRSEDAVYYCATARIVGATNWFDPWGQGTLVTVSS

SEQ ID NO: 1542 - protein, 120 aa, Artificial Sequence
  Synthetic polypeptide
QVQLVESGGGVVQPGRSLRLSCAASGFTFSSYAMHWVRQAPGKGLEWVAVISYDGSNKYYADSVKGRFTISRDNSKNTLYLQMNSLRAEDAVYYCARARSGSYFSWFDPWGQGTLVTVSS

SEQ ID NO: 1543 - protein, 120 aa, Artificial Sequence
  Synthetic polypeptide
QVQLVESGGGVVQPGRSLRLSCAASGFTFSSYAMHWVRQAPGKGLEWVAVISYDGSNKYYADSVKGRFTISRDNSKNTLYLQMNSLRAEDAVYYCARDSSGSYYGPFDYWGQGTLVTVSS

SEQ ID NO: 1544 - protein, 120 aa, Artificial Sequence
  Synthetic polypeptide
QVQLVESGGGVVQPGRSLRLSCAASGFTFSSYAMHWVRQAPGKGLEWVAVISYDGSNKYYADSVKGRFTISRDNSKNTLYLQMNSLRAEDAVYYCARAQGGGYYGAFDIWGQGTMVTVSS

SEQ ID NO: 1545 - protein, 120 aa, Artificial Sequence
  Synthetic polypeptide
QVQLVESGGGVVQPGRSLRLSCAASGFTFSSYAMHWVRQAPGKGLEWVAVISYDGSNKYYADSVKGRFTISRDNSKNTLYLQMNSLRAEDAVYYCARARSGSYLNWFDPWGQGTLVTVSS

SEQ ID NO: 1546 - protein, 120 aa, Artificial Sequence
  Synthetic polypeptide
QVQLVESGGGVVQPGRSLRLSCAASGFTFSSYAMHWVRQAPGKGLEWVAVISYDGSNKYYADSVKGRFTISRDNSKNTLYLQMNSLRAEDAVYYCARALWGNYYYGMDVWGQGTTVTVSS

SEQ ID NO: 1547 - protein, 120 aa, Artificial Sequence
  Synthetic polypeptide
QVQLVESGGGVVQPGRSLRLSCAASGFTFSSYAMHWVRQAPGKGLEWVAVISYDGSNKYYADSVKGRFTISRDNSKNTLYLQMNSLRAEDAVYYCARAYDGGYYYGMDVWGQGTTVTVSS

SEQ ID NO: 1548 - protein, 120 aa, Artificial Sequence
  Synthetic polypeptide
QVQLVESGGGVVQPGRSLRLSCAASGFTFSSYAMHWVRQAPGKGLEWVAVISYDGSNKYYADSVKGRFTISRDNSKNTLYLQMNSLRAEDAVYYCARPNSGSYWSFFDYWGQGTLVTVSS

SEQ ID NO: 1549 - protein, 120 aa, Artificial Sequence
  Synthetic polypeptide
QVQLVQSGAEVKKPGASVKVSCKVSGYTLTELSMHWVRQAPGKGLEWMGGFDPEDGETIYAQKFQGRVTMTEDTSTDTAYMELSSLRSEDAVYYCATAPIFGVVSWFDPWGQGTLVTVSS

SEQ ID NO: 1550 - protein, 120 aa, Artificial Sequence
  Synthetic polypeptide
QVQLVESGGGVVQPGRSLRLSCAASGFTFSSYGMHWVRQAPGKGLEWVAVISYDGSNKYYADSVKGRFTISRDNSKNTLYLQMNSLRAEDAVYYCAKGHSGSYYVYFDYWGQGTLVTVSS

SEQ ID NO: 1551 - protein, 120 aa, Artificial Sequence
  Synthetic polypeptide
QVQLVESGGGVVQPGRSLRLSCAASGFTFSSYAMHWVRQAPGKGLEWVAVISYDGSNKYYADSVKGRFTISRDNSKNTLYLQMNSLRAEDAVYYCARDLVVVAATPLDYWGQGTLVTVSS

SEQ ID NO: 1552 - protein, 120 aa, Artificial Sequence
  Synthetic polypeptide
EVQLVESGGGLVQPGGSLRLSCAASGFTFSSYWMSWVRQAPGKGLEWVANIKQDGSEKYYVDSVKGRFTISRDNAKNSLYLQMNSLRAEDAVYYCARDLDYYDSSGFDYWGQGTLVTVSS

SEQ ID NO: 1553 - protein, 120 aa, Artificial Sequence
  Synthetic polypeptide
QVQLVESGGGVVQPGRSLRLSCAASGFTFSSYAMHWVRQAPGKGLEWVAVISYDGSNKYYADSVKGRFTISRDNSKNTLYLQMNSLRAEDAVYYCARSGSGSYISRFDYWGQGTLVTVSS

SEQ ID NO: 1554 - protein, 120 aa, Artificial Sequence
  Synthetic polypeptide
QVQLVESGGGVVQPGRSLRLSCAASGFTFSSYAMHWVRQAPGKGLEWVAVISYDGSNKYYADSVKGRFTISRDNSKNTLYLQMNSLRAEDAVYYCARTYSGSYYRGFDYWGQGTLVTVSS

SEQ ID NO: 1555 - protein, 120 aa, Artificial Sequence
  Synthetic polypeptide
QVQLVESGGGVVQPGRSLRLSCAASGFTFSSYAMHWVRQAPGKGLEWVAVISYDGSNKYYADSVKGRFTISRDNSKNTLYLQMNSLRAEDAVYYCARAQSGSYVSPFDYWGQGTLVTVSS

SEQ ID NO: 1556 - protein, 120 aa, Artificial Sequence
  Synthetic polypeptide
QVQLVESGGGVVQPGRSLRLSCAASGFTFSSYAMHWVRQAPGKGLEWVAVISYDGSNKYYADSVKGRFTISRDNSKNTLYLQMNSLRAEDAVYYCARSSSGSYYYGMDVWGQGTTVTVSS

SEQ ID NO: 1557 - protein, 120 aa, Artificial Sequence
  Synthetic polypeptide
QVQLVQSGAEVKKPGASVKVSCKVSGYTLTELSMHWVRQAPGKGLEWMGGFDPEDGETIYAQKFQGRVTMTEDTSTDTAYMELSSLRSEDAVYYCATAPPVAGHNWFDPWGQGTLVTVSS

SEQ ID NO: 1558 - protein, 120 aa, Artificial Sequence
  Synthetic polypeptide
QVQLVESGGGVVQPGRSLRLSCAASGFTFSSYAMHWVRQAPGKGLEWVAVISYDGSNKYYADSVKGRFTISRDNSKNTLYLQMNSLRAEDAVYYCAKTYSGSYRGWFDPWGQGTLVTVSS

SEQ ID NO: 1559 - protein, 120 aa, Artificial Sequence
  Synthetic polypeptide
QVQLVESGGGVVQPGRSLRLSCAASGFTFSSYAMHWVRQAPGKGLEWVAVISYDGSNKYYADSVKGRFTISRDNSKNTLYLQMNSLRAEDAVYYCARAGSGSYYSHFDYWGQGTLVTVSS

SEQ ID NO: 1560 - protein, 120 aa, Artificial Sequence
  Synthetic polypeptide
EVQLVESGGGLVQPGGSLRLSCAASGFTFSSYWMSWVRQAPGKGLEWVANIKQDGSEKYYVDSVKGRFTISRDNAKNSLYLQMNSLRAEDAVYYCARGAYGGYEYYFDYWGQGTLVTVSS

SEQ ID NO: 1561 - protein, 120 aa, Artificial Sequence
  Synthetic polypeptide
QVQLVESGGGVVQPGRSLRLSCAASGFTFSSYAMHWVRQAPGKGLDWVAIISYDGSNKHYADSVKGRFTISRDNSKNTLYLQMNSLRAEDAVYNCARETGDSSSSHFDYWGQGTLVTVSS

SEQ ID NO: 1562 - protein, 120 aa, Artificial Sequence
  Synthetic polypeptide
QVQLVESGGGVVQPGRSLRLSCAASGFTFSSYAMHWVRQAPGKGLEWVAVISYDGSNKYYADSVKGRFTISRDNSKNTLYLQMNSLRAEDAVYYCARASSGSYYNAFDYWGQGTLVTVSS

SEQ ID NO: 1563 - protein, 120 aa, Artificial Sequence
  Synthetic polypeptide
EVQLVESGGGLVKPGGSLRLSCAASGFTFSSYSMNWVRQAPGKGLEWVSSISSSSSYIYYADSVKGRFTISRDNAKNSLYLQMNSLRAEDAVYYCARDLTTVTTNHFDYWGQGTLVTVSS

SEQ ID NO: 1564 - protein, 120 aa, Artificial Sequence
  Synthetic polypeptide
QVQLVESGGGVVQPGRSLRLSCAASGFTFSSYGMHWVRQAPGKGLEWVAVIWYDGSNKYYADSVKGRFTISRDNSKNTLYLQMNSLRAEDAVYYCAREGIVGATTGMDVWGQGTTVTVSS

SEQ ID NO: 1565 - protein, 120 aa, Artificial Sequence
  Synthetic polypeptide
QVQLVESGGGVVQPGRSLRLSCAASGFTFSSYAMHWVRQAPGKGLEWVAVISYDGSNKYYADSVKGRFTISRDNSKNTLYLQMNSLRAEDAVYYCARSYSGSYWGPFDYWGQGTLVTVSS

SEQ ID NO: 1566 - protein, 120 aa, Artificial Sequence
  Synthetic polypeptide
QVQLVESGGGVVQPGRSLRLSCAASGFTFSSYAMHWVRQAPGKGLEWVAVISYDGSNKYYADSVKGRFTISRDNSKNTLYLQMNSLRAEDAVYYCARAHSGSYFGWFDPWGQGTLVTVSS

SEQ ID NO: 1567 - protein, 119 aa, Artificial Sequence
  Synthetic polypeptide
QVQLQESGPGLVKPSETLSLTCTVSGGSISSYYWSWIRQPPGKGLEWIGYIYYSGSTNYNPSLKSRVTISVDTSKNQFSLKLSSVTAADAVYYCARGPVGYYYYYMDVWGKGTTVTVSS

SEQ ID NO: 1568 - protein, 120 aa, Artificial Sequence
  Synthetic polypeptide
QVQLVQSGAEVKKPGASVKVSCKVSGYTLTELSMHWVRQAPGKGLEWMGGFDPEDGETIYAQKFQGRVTMTEDTSTDTAYMELSSLRSEDAVYYCATGPVRGVPNWFDPWGQGTLVTVSS

SEQ ID NO: 1569 - protein, 120 aa, Artificial Sequence
  Synthetic polypeptide
QVQLVESGGGVVQPGRSLRLSCAASGFTFSSYAMHWVRQAPGKGLEWVAVISYDGSNKYYADSVKGRFTISRDNSKNTLYLQMNSLRAEDAVYYCARGKGGSYRGPFDYWGQGTLVTVSS

SEQ ID NO: 1570 - protein, 120 aa, Artificial Sequence
  Synthetic polypeptide
QVQLVESGGGVVQPGRSLRLSCAASGFTFSTYAMHWVRQAPGKGLEWVAVISYDGSNKYYADSVKGRFTISRDNSKNTLYLQMNSLRAEDAVYYCARGLGGHYYYGMDVWGQGTTVTVSS

SEQ ID NO: 1571 - protein, 120 aa, Artificial Sequence
  Synthetic polypeptide
QVQLVQSGAEVKKPGASVKVSCKVSGYTLTELSMHWVRQAPGKGLEWMGGFDPEDGETIYAQKFQGRVTMTEDTSTDTAYMELSSLRSEDAVYYCATGPPYGDYRWFDPWGQGTLVTVSS

SEQ ID NO: 1572 - protein, 120 aa, Artificial Sequence
  Synthetic polypeptide
QVQLVESGGGVVQPGRSLRLSCAASGFTFSSYAMHWVRQAPGKGLEWVAVISYDGSNKYYADSVKGRFTISRDNSKNTLYLQMNSLRAEDAVYYCAREDIVVATDAFDIWGQGTMVTVSS

SEQ ID NO: 1573 - protein, 120 aa, Artificial Sequence
  Synthetic polypeptide
QVQLVESGGGVVQPGRSLRLSCAASGFTFTSYGMHWVRQAPGKGLEWVALISYDGSNKYYADSVKGRFIISRDDSKNTLFLQMHSLRAEDAVYYCAKPVGGNYYYGMDVWGQGTTVTVSS

SEQ ID NO: 1574 - protein, 120 aa, Artificial Sequence
  Synthetic polypeptide
QVQLVESGGGVVQPGRSLRLSCAASGFTFSSYGMHWVRQAPGKGLEWVAVIWYDGSNKYYADSVKGRFTISRDNSKNTLYLQMNSLRAEDAVYYCARDYDILTGYYFDYWGQGTLVTVSS

SEQ ID NO: 1575 - protein, 120 aa, Artificial Sequence
  Synthetic polypeptide
QVQLVQSGAEVKKPGASVKVSCKVSGYTLTELSMHWVRQAPGKGLEWMGGFDPEDGETIYAQKFQGRVTMTEDTSTDTAYMELSSLRSEDAVYYCATGPVVVRDNWFDPWGQGTLVTVSS

SEQ ID NO: 1576 - protein, 120 aa, Artificial Sequence
  Synthetic polypeptide
QVQLVQSGAEVKKPGASVKVSCKVSGYTLTELSMHWVRQAPGKGLEWMGGFDPEDGETIYAQKFQGRVTMTEDTSTDTAYMELSSLRSEDAVYYCATSPAAIRENWFDPWGQGTLVTVSS

SEQ ID NO: 1577 - protein, 119 aa, Artificial Sequence
  Synthetic polypeptide
EVQLVESGGGLVQPGGSLRLSCAASGFTFSSYDMHWVRQATGKGLEWVSAIGTAGDTYYPGSVKGRFTISRENAKNSLYLQMNSLRAGDAVYYCARGDSSGWYYYFDYWGQGTLVTVSS

SEQ ID NO: 1578 - protein, 120 aa, Artificial Sequence
  Synthetic polypeptide
QVQLVESGGGVVQPGRSLRLSCAASGFTFSSYAMHWVRQAPGKGLEWVAVVSFDGSNKYYADSVKGRFTISRDNSKNTLYLQMNSLRAEDSVYYCARTYSGSYSGHFDYWGQGTLVTVSS

SEQ ID NO: 1579 - protein, 120 aa, Artificial Sequence
  Synthetic polypeptide
QVQLVESGGGVVQPGRSLRLSCAGSGYIFSSYAIHWVRQPPGRGLEWVAVIGYDGSNQYYADSVKGRFTLSRDNSKNTVYLQMNSLRAEDAVYYCARADSGSYSAYFDYWGQGTLVTVSS

SEQ ID NO: 1580 - protein, 120 aa, Artificial Sequence
  Synthetic polypeptide
QVQLVESGGGVVQPGRSLRLSCAASGFTFSSYAMHWVRQAPGKGLEWVAVISYDGSNKYYADSVKGRFTISRDNSKNTLYLQMNSLRAEDAVYYCARTNSGSYVSAFDIWGQGTMVTVSS

SEQ ID NO: 1581 - protein, 120 aa, Artificial Sequence
  Synthetic polypeptide
QVQLVESGGGVVQPGRSLRLSCAASGFTFSSYGMHWVRQAPGKGLEWVAVISYDGSNKYYADSVKGRFTISRDNSKNTLYLQMNSLRAEDAVYYCAKARGGSYLDAFDIWGQGTMVTVSS

SEQ ID NO: 1582 - protein, 120 aa, Artificial Sequence
  Synthetic polypeptide
QVQLVESGGGVVQPGRSLRLSCAASGFTFSSYAMHWVRQAPGKGLEWVAVISYDGSNKYYADSVKGRFTISRDNSKNTLYLQMNSLRAEDAVYYCARPRSGSYRSLFDYWGQGTLVTVSS

SEQ ID NO: 1583 - protein, 120 aa, Artificial Sequence
  Synthetic polypeptide
QVQLVQSGAEVKKPGASVKVSCKVSGYTLTELSMHWVRQAPGKGLEWMGGFDPEDGETIYAQKFQGRVTMTEDTSTDTAYMELSSLRSEDAVYYCATAPLVGATWWFDPWGQGTLVTVSS

SEQ ID NO: 1584 - protein, 120 aa, Artificial Sequence
  Synthetic polypeptide
QVQLVQSGAEVKKPGASVKVSCKVSGYTLTELSMHWVRQAPGKGLEWMGGFDPEDGETIYAQKFQGRVTMTEDTSTDTAYMELSSLRSEDAVYYCATAPSTVTTAWFDPWGQGTLVTVSS

SEQ ID NO: 1585 - protein, 120 aa, Artificial Sequence
  Synthetic polypeptide
QVQLVQSGAEVKKPGASVKVSCKVSGYTLTELSMHWVRQAPGKGLEWMGGFDPEDGETIYAQKFQGRVTMTEDTSTDTAYMELSSLRSEDAVYYCATSTIFGVANWFDPWGQGTLVTVSS

SEQ ID NO: 1586 - protein, 120 aa, Artificial Sequence
  Synthetic polypeptide
QVQLVQSGAEVKKPGASVKVSCKVSGYTLTELSMHWVRQAPGKGLEWMGGFDPEDGETIYAQKFQGRVTMTEDTSTDTAYMELSSLRSEDAVYYCATTPVVVVAGWFDPWGQGTLVTVSS

SEQ ID NO: 1587 - protein, 120 aa, Artificial Sequence
  Synthetic polypeptide
QVQLVESGGGVVQPGRSLRLSCAASGFTFSSYAMHWVRQAPGKGLEWVAVISYDGSNKYYADSVKGRFTISRDNSKNTLYLQMNSLRAEDAVYYCARAKSGSYYSAFDYWGQGTLVTVSS

SEQ ID NO: 1588 - protein, 120 aa, Artificial Sequence
  Synthetic polypeptide
QVQLVESGGGVVQPGRSLRLSCAASGFTFSSYAMHWVRQAPGKGLEWVAVISYDGSNKYYADSVKGRFTISRDNSKNTLYLQMNSLRAEDAVYYCARAQSGSYYSPFDYWGQGTLVTVSS

SEQ ID NO: 1589 - protein, 120 aa, Artificial Sequence
  Synthetic polypeptide
QVQLVESGGGVVQPGRSLRLSCAASGFTFSSYGMHWVRQAPGKGLEWVAVISYDGSNKYYADSVKGRFTISRDNSKNTLYLQMNSLRAEDAVYYCAKAFGGGYYSPFDYWGQGTLVTVSS

SEQ ID NO: 1590 - protein, 121 aa, Artificial Sequence
  Synthetic polypeptide
RVTLRESGPALVKPTQTLTLTCTFSGFSLSTSGMCVSWIRQPPGKALEWLARIDWDDDKYYSTSLKTRLTISKDTSKNQVVLTMTNMDPVDATYYCARIPIAVAGTASDYWGQGTLVTVSS

SEQ ID NO: 1591 - protein, 120 aa, Artificial Sequence
  Synthetic polypeptide
QVQLVESGGGVVQPGRSLRLSCAASGFTFSSYGMHWVRQAPGKGLEWVAVISYDGSNKYYADSVKGRFTISRDNSKNTLYLQMNSLRAEDAVYYCAKSRGGSYQDAFDIWGQGTMVTVSS

SEQ ID NO: 1592 - protein, 120 aa, Artificial Sequence
  Synthetic polypeptide
QVQLVESGGGVVQPGRSLRLSCAASGFTFSSYAMHWVRQAPGKGLEWVAVISYDGSNKYYADSVKGRFTISRDNSKNTLYLQMNSLRAEDAVYYCAKVGGGSYLYYFDYWGQGTLVTVSS

SEQ ID NO: 1593 - protein, 120 aa, Artificial Sequence
  Synthetic polypeptide
QVQLVESGGGVVQPGRSLRLSCAASGFTFSSYAMHWVRQAPGKGLEWVAVISYDGSNKYYADSVKGRFTISRDNSKNTLYLQMNSLRAEDAVYYCARCGSGSYWSWFDPWGQGTLVTVSS

SEQ ID NO: 1594 - protein, 120 aa, Artificial Sequence
  Synthetic polypeptide
QVQLVESGGGVVQPGRSLRLSCAASGFTFSSYAMHWVRQAPGKGLEWVAVISYDGSNKYYADSVKGRFTISRDNSKNTLYLQMNSLRAEDAVYYCARDRSGSYSFDFDYWGQGTLVTVSS

SEQ ID NO: 1595 - protein, 120 aa, Artificial Sequence
  Synthetic polypeptide
QVQLVESGGGVVQPGRSLRLSCAASGFTFSTYAMHWVRQAPGKGLEWVAVISYDGSNKYYADFVKGRFAMSRDNSKNTLDLQMDSLRAEDAIYYCARPTSGSYWDAFDIWGQGTMVTVSS

SEQ ID NO: 1596 - protein, 119 aa, Artificial Sequence
  Synthetic polypeptide
EVQLVESGGGLVQPGGSLRLSCAASGFTFSSYDMHWVRQATGKGLEWVSAIGTAGDPYYPGSVKGRFTISRENAKNSLYLQMNSLRAGDAVYYCARAGIAARPWYFDLWGRGTLVTVSS

SEQ ID NO: 1597 - protein, 120 aa, Artificial Sequence
  Synthetic polypeptide
QVQLVESGGGVVQPGRSLRLSCAASGFTFSSYGMHWVRQAPGKGLEWVAVIWYDGSNKYYADSVKGRFTISRDNSKNTLYLQMNSLRAEDAVYYCARDVRDYYYYGMDVWGQGTTVTVSS

SEQ ID NO: 1598 - protein, 120 aa, Artificial Sequence
  Synthetic polypeptide
QVQLVESGGGVVQPGRSLRLSCAASGFTFSSYGMHWVRQAPGKGLEWVAVISYDGSNKYYADSVKGRFTISRDNSKNTLYLQMNSLRAEDAVYYCAKGLSGSYYPPFDYWGQGTLVTVSS

SEQ ID NO: 1599 - protein, 120 aa, Artificial Sequence
  Synthetic polypeptide
QVQLVESGGGVVQPGRSLRLSCAASGFTFSSYAMHWVRQAPGKGLEWVAVISYDGSNKYYADSVKGRFTISRDNSKNTLYLQMNSLRAEDAVYYCARDRSGSYHGGLDYWGQGTLVTVSS

SEQ ID NO: 1600 - protein, 120 aa, Artificial Sequence
  Synthetic polypeptide
EVQLVESGGGLVQPGGSLRLSCAASGFTFSSYWMSWVRQAPGKGLEWVANIKQDGSEKYYVDSVKGRFTISRDNAKNSLYLQMNSLRAEDAVYYCARDRDGDYYYGMDVWGQGTTVTVSS

SEQ ID NO: 1601 - protein, 120 aa, Artificial Sequence
  Synthetic polypeptide
QVQLVESGGGVVQPGRSLRLSCAASGFTFSSYAMHWVRQAPGKGLEWVAVISYDGSNKYYADSVKGRFTISRDNSKNTLYLQMNSLRAEDAVYYCARAKGGSYFVAFDIWGQGTMVTVSS

SEQ ID NO: 1602 - protein, 120 aa, Artificial Sequence
  Synthetic polypeptide
QVQLVESGGGVVQPGRSLRLSCAASGFTFSSYAMHWVRQAPGKGLEWVAVISYDGSNKYYADSVKGRFTISRDNSKNTLYLQMNSLRAEDAVYYCARPHSGSYYGPLDYWGQGTLVTVSS

SEQ ID NO: 1603 - protein, 120 aa, Artificial Sequence
  Synthetic polypeptide
QVQLVESGGGVVQPGRSLRLSCAASGFTFSSYAMHWVRQAPGKGLEWVAVISYDGSNKYYADSVKGRFTISRDNSKNTLYLQMNSLRAEDAVYYCARGPGGSYYDYFDYWGQGTLVTVSS

SEQ ID NO: 1604 - protein, 120 aa, Artificial Sequence
  Synthetic polypeptide
QVQLVESGGGVVQPGRSLRLSCAASGFTFSSYAMHWVRQAPGKGLEWVAVISYDGSNKYYADSVKGRFTISRDNSKNTLYLQMNSLRAEDAVYYCARGEGGSYYGPFDYWGQGTLVTVSS

SEQ ID NO: 1605 - protein, 120 aa, Artificial Sequence
  Synthetic polypeptide
QVQLVESGGGVVQPGRSLRLSCAASGFTFSSYAMHWVRQAPGKGLEWVAVISYDGSNKYYADSVKGRFTISRDNSKNTLYLQMNSLRAEDAVYYCARLYSGSYRGHFDYWGQGTLVTVSS

SEQ ID NO: 1606 - protein, 120 aa, Artificial Sequence
  Synthetic polypeptide
QVQLVESGGGVVQPGRSLRLSCAASGFTFSSYAMHWVRQAPGKGLEWVAVISYDGSNKYYADSVKGRFTISRDNSKNTLYLQMNSLRAEDAVYYCARDRRGGYSFTFDYWGQGTLVTVSS

SEQ ID NO: 1607 - protein, 120 aa, Artificial Sequence
  Synthetic polypeptide
QVQLVQSGAEVKKPGASVKVSCKVSGYTLTELSMHWVRQAPGKGLEWMGGFDPEDGETIYAQKFQGRVTMTEDTSTDTAYMELSSLRSEDAVYYCATTPAIFGVVRFDYWGQGTLVTVSS

SEQ ID NO: 1608 - protein, 120 aa, Artificial Sequence
  Synthetic polypeptide
QVQLVESGGGVVQPGRSLRLSCAASGFTFSSYAMHWVRQAPGKGLEWVAVISYDGSNKYYADSVKGRFTISRDNSKNTLYLQMNSLRAEDAVYYCARSTAGTYYYGMDVWGQGTTVTVSS

SEQ ID NO: 1609 - protein, 120 aa, Artificial Sequence
  Synthetic polypeptide
QVQLVQSGAEVKKPGASVKVSCKVSGYTLTELSMHWVRQAPGKGLEWMGGFDPEDGETIYAQKFQGRVTMTEDTSTDTAYMELSSLRSEDAVYYCATSFAIFGVVYFDYWGQGTLVTVSS

SEQ ID NO: 1610 - protein, 120 aa, Artificial Sequence
  Synthetic polypeptide
QVQLVESGGGVVQPGRSLRLSCAASGFTFSSYAMHWVRQAPGKGLEWVAVISYDGSNKYYADSVKGRFTISRDNSKNTLYLQMNSLRAEDAVYYCAREPIAAAGYYFDYWGQGTLVTVSS

SEQ ID NO: 1611 - protein, 120 aa, Artificial Sequence
  Synthetic polypeptide
QVQLVESGGGVVQPGRSLRLSCAASGFTFSSYAMHWVRQAPGKGLEWVAVISYDGSNKYYADSVKGRFTISRDNSKNTLYLQMNSLRAEDAVYYCARSYGGSYYNWFDPWGQGTLVTVSS

SEQ ID NO: 1612 - protein, 120 aa, Artificial Sequence
  Synthetic polypeptide
QVQLVESGGGVVQPGRSLRLSCAASGFTFSSYAMHWVRQAPGKGLEWVAVISYDGSNKYYADSVKGRFTISRDNSKNTLYLQMNSLRAEDAVYYCASAYSGSYVGYFDYWGQGTLVTVSS

SEQ ID NO: 1613 - protein, 120 aa, Artificial Sequence
  Synthetic polypeptide
QVQLVESGGGVVQPGRSLRLSCAASGFTFSSYAMHWVRQAPGKGLEWVAVISYDGSNKYYADSVKGRFTISRDNSKNTLYLQMNSLRAEDAVYYCARSHSGSYRGAFDIWGQGTMVTVSS

SEQ ID NO: 1614 - protein, 121 aa, Artificial Sequence
  Synthetic polypeptide
QVTLRESGPALVKPTQTLTLTCTFSGFSLSTSGMCVSWIRQPPGKALEWLALIDWDDDKYYSTSLKTRLTISKDTSKNQVVLTMTNMDPVDATYYCARVRIAVAGSPFDYWGQGTLVTVSS

SEQ ID NO: 1615 - protein, 120 aa, Artificial Sequence
  Synthetic polypeptide
QVQLVESGGGVVQPGRSLRLSCAASGFTFSSYAMHWVRQAPGKGLEWVAVISYDGSNKYYADSVKGRFTISRDNSKNTLYLQMNSLRAEDAVYYCARVRGGSYFGSFDYWGQGTLVTVSS

SEQ ID NO: 1616 - protein, 120 aa, Artificial Sequence
  Synthetic polypeptide
QVQLVESGGGVVQPGRSLRLSCAASGFTFSSYGMHWVRQAPGKGLEWVAVIWYDGSNKYYADSVKGRFTISRDNSKNTLYLQMNSLRAEDAVYYCARDLVAVAGYGMDVWGQGTTVTVSS

SEQ ID NO: 1617 - protein, 120 aa, Artificial Sequence
  Synthetic polypeptide
QVQLVESGGGVVQPGRSLRLSCAASGFTFSSYAMHWVRQAPGKGLEWVAVISYDGSNKYYADSVKGRFTISRDNSKNTLYLQMNSLRAEDAVYYCARARGGSYFNAFDIWGQGTMVTVSS

SEQ ID NO: 1618 - protein, 120 aa, Artificial Sequence
  Synthetic polypeptide
QVQLVESGGGVVQPGRSLRLSCAASGFTFSSYAMHWVRQAPGKGLEWVAVISYDGSNKYYADSVKGRFTISRDNSKNTLYLQMNSLRAEDAVYYCARECIAAAGDAFDIWGQGTMVTVSS

SEQ ID NO: 1619 - protein, 120 aa, Artificial Sequence
  Synthetic polypeptide
QVQLVESGGGVVQPGRSLRLSCAASGFTFSSYAMHWVRQAPGKGLEWVAVISYDGSNKYYADSVKGRFTISRDNSKNTLYLQMNSLRAEDAVYYCARALSGSYGSAFDIWGQGTMVTVSS

SEQ ID NO: 1620 - protein, 120 aa, Artificial Sequence
  Synthetic polypeptide
QVQLVESGGGVVQPGRSLRLSCAASGFTFSSYAMHWVRQAPGKGLEWVAVISYDGSNKYYADSVKGRFTISRDNSKNTLYLQMNSLRAEDAVYYCARSGSGSYYTYFDYWGQGTLVTVSS

SEQ ID NO: 1621 - protein, 120 aa, Artificial Sequence
  Synthetic polypeptide
QVQLVESGGGVVQPGRSLRLSCAASGFTFSSYAMHWVRQAPGKGLEWVAVISYDGSNKYYADSVKGRFTISRDNSKNTLYLQMNSLRAEDAVYYCARGSGGSYRGYFDYWGQGTLVTVSS

SEQ ID NO: 1622 - protein, 120 aa, Artificial Sequence
  Synthetic polypeptide
QVQLVQSGAEVKKPGASVKVSCKVSGYTLTELSMHWVRQAPGKGLEWMGGFDPEDGETIYAQKFQGRVTMTEDTSTDTAYMELSSLRSEDAVYYCATSTTVTTSSWFDPWGQGTLVTVSS

SEQ ID NO: 1623 - protein, 120 aa, Artificial Sequence
  Synthetic polypeptide
QVQLVESGGGVVQPGRSLRLSCAASGFTFSSYGMHWVRQAPGKGLEWVAVISYDGSNKYYADSVKGRFTISRDNSKNTLYLQMNSLRAEDAVYYCAKSNRGSYYYGMDVWGQGTTVTVSS

SEQ ID NO: 1624 - protein, 120 aa, Artificial Sequence
  Synthetic polypeptide
EVQLVESGGGLVKPGGSLRLSCAASGFTFSSYSMNWVRQAPGKGLEWVSSISSSSSYIYYADSVKGRFTISRDNAKNSLYLQMNSLRAEDAVYYCARDVTMVRGVPFDYWGQGTLVTVSS

SEQ ID NO: 1625 - protein, 119 aa, Artificial Sequence
  Synthetic polypeptide
EVQLVESGGGLVQPGGSLRLSCAASGFTFSSYDMHWVRQATGKGLEWVSAIGTAGDTYYPGSVKGRFTISRENAKNSLYLQMNSLRAGDAVYYCARGNYDILTGYFDYWGQGTLVTVSS

SEQ ID NO: 1626 - protein, 120 aa, Artificial Sequence
  Synthetic polypeptide
QVQLVESGGGVVQPGRSLRLSCAASGFTFSSYAMHWVRQAPGKGLEWVAVISYDGSNKYYADSVKGRFTISRDNSKNTLYLQMNSLRAEDAVYYCARPSGGSYLAWFDPWGQGTLVTVSS

SEQ ID NO: 1627 - protein, 120 aa, Artificial Sequence
  Synthetic polypeptide
EVQLVESGGGLVQPGGSLRLSCAASGFTFSSYWMSWVRQAPGKGLEWVANIKQDGSEKYYVDSVKGRFTISRDNAKNSLYLQMNSLRAEDAVYYCARCEYSGYDCYFDYWGQGTLVTVSS

SEQ ID NO: 1628 - protein, 120 aa, Artificial Sequence
  Synthetic polypeptide
QVQLVESGGGVVQPGRSLRLSCAASGFTFSSYAMHWVRQAPGKGLEWVAVISYDGSNKYYADSVKGRFTISRDNSKNTLYLQMNSLRAEDAVYYCARVRGGSYSYYFDYWGQGTLVTVSS

SEQ ID NO: 1629 - protein, 121 aa, Artificial Sequence
  Synthetic polypeptide
RVTLRESGPALVKPTQTLTLTCTFSGFSLSTSGMCVSWIRQPPGKALEWLARIDWDDDKYYSTSLKTRLTISKDTSKNQVVLTMTNMDPVDATYYCARTHIAAAGTALDYWGQGTLVTVSS

SEQ ID NO: 1630 - protein, 120 aa, Artificial Sequence
  Synthetic polypeptide
QVQLVESGGGVVQPGRSLRLSCAASGFTFSSYAMHWVRQAPGKGLEWVAVISYDGSNKYYADSVKGRFTISRDNSKNTLYLQMNSLRAEDAVYYCARPSSGYYLDYFDYWGQGTLVTVSS

SEQ ID NO: 1631 - protein, 120 aa, Artificial Sequence
  Synthetic polypeptide
EVQLVESGGGLVQPGGSLRLSCAASGFTFSSYEMNWVRQAPGKGLEWVSYISSSGSTIYYADSVKGRFTISRDNAKNSLYLQMNSLRAEDAVYYCARAGYDFWSGYCDYWGQGTLVTVSS

SEQ ID NO: 1632 - protein, 120 aa, Artificial Sequence
  Synthetic polypeptide
QVQLVESGGGVVQPGRSLRLSCAASGFTFSSYAMHWVRQAPGKGLEWVAVISYDGSNKYYADSVKGRFTISRDNSKNTLYLQMNSLRAEDAVYYCARAFSGSYVSWFDPWGQGTLVTVSS

SEQ ID NO: 1633 - protein, 120 aa, Artificial Sequence
  Synthetic polypeptide
QVQLVESGGGVVQPGRSLRLSCAASGFTFSIYAMHWVRQAPGKGLEWVAVISYDGSNEYYADSVKGRFTISRDNSKNTLYLQMNSLRAEDAVYYCARDYSGSYSGLFDYWGQGTLVTVSS

SEQ ID NO: 1634 - protein, 120 aa, Artificial Sequence
  Synthetic polypeptide
QVQLVQSGAEVKKPGASVKVSCKVSGYTLTELSMHWVRQAPGKGLEWMGGFDPEDGETIYAQKFQGRVTMTEDTSTDTAYMELSSLRSEDAVYYCATSSIAARPDWFDPWGQGTLVTVSS

SEQ ID NO: 1635 - protein, 120 aa, Artificial Sequence
  Synthetic polypeptide
QVQLVESGGGVVQPGRSLRLSCAASGFTFSSYGMHWVRQAPGKGLEWVAVIWYDGSNKYYADSVKGRFTISRDNSKNTLYLQMNSLRAEDAVYYCARDITGTTLYGMDVWGQGTTVTVSS

SEQ ID NO: 1636 - protein, 120 aa, Artificial Sequence
  Synthetic polypeptide
QVQLVESGGGVVQPGRSLRLSCAASGFTFSSYAMHWVRQAPGKGLEWVAVISYDGSNKYYADSVKGRFTISRDNSKNTLYLQMNTLRAEDAVYYCARPSGGNYASYFDYWGQGTLVTVSS

SEQ ID NO: 1637 - protein, 120 aa, Artificial Sequence
  Synthetic polypeptide
QVQLVESGGGVVQPGRSLRLSCAASGFTFSSYAMYWVRQAPGKGLEWVAVISYDGSNKYYADSVKGRFTISRDNSKNTLYLQMNSLRAEDAVYFCARTRSGSYYSAFDIWGQGTMVTVSS

SEQ ID NO: 1638 - protein, 120 aa, Artificial Sequence
  Synthetic polypeptide
QVQLVESGGGVVQPGRSLRLSCAASGFTFSSYAMHWVRQAPGKGLEWVAVISYDGSNKYYADSVKGRFTISRDNSKNTLYLQMNSLRAEDAVYYCARSVGGSYFGWFDPWGQGTLVTVSS

SEQ ID NO: 1639 - protein, 120 aa, Artificial Sequence
  Synthetic polypeptide
QVQLVESGGGVVQPGRSLRLSCAASGFTFSSYGMHWVRQAPGKGLEWVAVISYDGSNKYYADSVKGRFTISRDNSKNTLYLQMNSLRAEDAVYYCAKGVSGYYLDAFDIWGQGTMVTVSS

SEQ ID NO: 1640 - protein, 120 aa, Artificial Sequence
  Synthetic polypeptide
EVQLLESGGGLVQPGGSLRLSCAASGFTFSSYAMSWVRQAPGKGLEWVSAISGSGGSTYYADSVKGRFTISRDNSKNTLYLQMNSLRAEDAVYYCAKDGIYGDYDFFDYWGQGTLVTVSS

SEQ ID NO: 1641 - protein, 120 aa, Artificial Sequence
  Synthetic polypeptide
QVQLVESGGGVVQPGRSLRLSCAASGFTFSSYGMHWVRQAPGKGLEWVAVISYDGSNKYYADSVKGRFTISRDNSKNTLYLQMNSLRAEDAVYYCASSTSGSYYGPFDYWGQGTLVTVSS

SEQ ID NO: 1642 - protein, 120 aa, Artificial Sequence
  Synthetic polypeptide
QVQLVESGGGVVQPGRSLRLSCAASGFTFSSYAMHWVRQAPGKGLEWVAVISYDGSNKYYADSVKGRFTISRDNSKNTLYLQMNSLRAEDAVYYCARDLSGSYVGWFDPWGQGTLVTVSS

SEQ ID NO: 1643 - protein, 120 aa, Artificial Sequence
  Synthetic polypeptide
QVQLVESGGGVVQPGRSLRLSCAASGFTFSSYAIHWVRQAPGKGLEWVAVISYDGSNKYYADSVKGRFTISRDNSKNTLYLQMNSLRAEDAVYYCARGYSGSYGVYFQHWGQGTLVTVSS

SEQ ID NO: 1644 - protein, 120 aa, Artificial Sequence
  Synthetic polypeptide
QVQLVQSGAEVKKPGASVKVSCKASGYTFTSYGISWVRQAPGQGLEWMGWISAYNGNTNYAQKLQGRVTMTTDTSTSTAYMELRSLRSDDAVYYCAREGIAVAGTGIDYWGQGTLVTVSS

SEQ ID NO: 1645 - protein, 120 aa, Artificial Sequence
  Synthetic polypeptide
QVQLVESGGGVVQPGRSLRLSCAASGFTFSSYAMHWVRQAPGKGLEWVAVISYDGSNKYYADSVKGRFTISRDNSKNTLYLQMNSLRAEDAVYYCARTYSGSYTGWFDYWGQGTLVTVSS

SEQ ID NO: 1646 - protein, 121 aa, Artificial Sequence
  Synthetic polypeptide
QVQLQESGPGLVKPSQTLSLTCTVSGGSISSGGYYWSWIRQHPGKGLEWIGYIYYSGSTYYNPSLKSRVTISVDTSKNQFSLKLSSVTAADAVYYCARMITMIVVNAFDIWGQGTMVTVSS

SEQ ID NO: 1647 - protein, 120 aa, Artificial Sequence
  Synthetic polypeptide
QVQLVESGGGVVQPGRSLRLSCAASGFTFSSYAMHWVRQAPGKGLEWVAVISYDGSNKYYADSVKGRFTISRDNSKNTLYLQMNSLRAEDAVYYCARTYSGSYYNDFDYWGQGTLVTVSS

SEQ ID NO: 1648 - protein, 120 aa, Artificial Sequence
  Synthetic polypeptide
EVQLVESGGGLVKPGGSLRLSCAASGFTFSTYSMNWVRQAPGKGLEWVSSISSSSSYIYYADSVKGRFTISRDNAKNSLYLQMNSLRAEDAVYYCARGPRGYSYGMIDYWGQGTLVTVSS

SEQ ID NO: 1649 - protein, 120 aa, Artificial Sequence
  Synthetic polypeptide
QVQLVESGGGVVQPGRSLRLSCAASGFTFSSYAMHWVRQAPGKGLEWVAVISYDGSNKYYADSVKGRFTISRDNSKNTLYLQMNSLRAEDAVYYCARAYSGSYWAPFDYWGQGTLVTVSS

SEQ ID NO: 1650 - protein, 120 aa, Artificial Sequence
  Synthetic polypeptide
QVQLVESGGGVVQPGRSLRLSCAASGFTFSSYGMHWVRQAPGKGLEWVAVISYDGSNKYYADSVKGRFTISRDNSKNTLYLQMNSLRAEDAVYYCARTTAGSYYYGMDVWGQGTTVTVSS

SEQ ID NO: 1651 - protein, 120 aa, Artificial Sequence
  Synthetic polypeptide
QVQLVESGGGVVQPGRSLRLSCAASGFIFSSYAMHWVRQAPGKGLEWVAVISYDGSNKYYADSVKGRLTISRDNSKNTLYLQMNSLRAEDAVYYCARPLGGSYYAGFDYWGQGTLVTVSS

SEQ ID NO: 1652 - protein, 120 aa, Artificial Sequence
  Synthetic polypeptide
QVQLVESGGGVVQPGRSLRLSCAASGFTFSSYAMHWVRQAPGKGLEWVAVISYDGSNKYYADSVKGRFTISRDNSKNTLYLQMNSLRAEDAVYYCARSWSGSYFAPFDYWGQGTLVTVSS

SEQ ID NO: 1653 - protein, 120 aa, Artificial Sequence
  Synthetic polypeptide
QVQLVESGGGVVQPGRSLRLSCAASGFTFSSYAMHWVRQAPGKGLEWVAVISYDGSNKYYADSVKGRFTISRDNSKNTLYLQMNSLRAEDAVYYCARGASGSYRTPFDYWGQGTLVTVSS

SEQ ID NO: 1654 - protein, 120 aa, Artificial Sequence
  Synthetic polypeptide
EVQLLESGGGLVQPGGSLRLSCAASGFTFSSYAMSWVRQAPGKGLEWVSAISGSGGSTYYADSVKGRFTISRDNSKNTLYLQMNSLRAEDAVYYCARMYSGSYYGYFDYWGQGTLVTVSS

SEQ ID NO: 1655 - protein, 120 aa, Artificial Sequence
  Synthetic polypeptide
QVQLVQSGAEVKKPGASVKVSCKVSGYTLTELSMHWVRQAPGKGLEWMGGFDPEDGETIYAQKFQGRVTMTEDTSTDTAYMELSSLRSEDAVYYCATALLPYYYYYMDVWGKGTTVTVSS

SEQ ID NO: 1656 - protein, 120 aa, Artificial Sequence
  Synthetic polypeptide
QVQLVESGGGVVQPGRSLRLSCAASGFTFSSYAMHWVRQAPGKGLEWVAVISYDGSNKYYADSVKGRFTISRDNSKNTLYLQMNSLRAEDAVYYCARSGRGSYQNWFDPWGQGTLVTVSS

SEQ ID NO: 1657 - protein, 120 aa, Artificial Sequence
  Synthetic polypeptide
QVQLVESGGGVVQPGRSLRLSCAASGFTFSSYAMHWVRQAPGKGLEWVAVISYDGSNKYYADSVKGRFTISRDNSKNTLYLQMNSLRAEDAVYYCARGYSGSYLVAFDIWGQGTMVTVSS

SEQ ID NO: 1658 - protein, 120 aa, Artificial Sequence
  Synthetic polypeptide
QVQLVESGGGVVQPGRSLRLSCAASGFTFSSYAMHWVRQAPGKGLEWVAVISYDGSNKYYADSVKGRFTISRDNSKNTLYVQMNSLRAEDAVYYCARDFRGNYYYGMDVWGQGTTVTVSS

SEQ ID NO: 1659 - protein, 120 aa, Artificial Sequence
  Synthetic polypeptide
QVQLVESGGGVVQPGRSLRLSCAASGFTFSSYGMHWVRQAPGKGLEWVAVISYDGSNKYYADSVKGRFTISRDNSKNTLYLQMNSLRAEDAVYYCAKGRSGSYYSSFDYWGQGTLVTVSS

SEQ ID NO: 1660 - protein, 120 aa, Artificial Sequence
  Synthetic polypeptide
QVQLVESGGGVVQPGRSLRLSCAASGFTFSSYAMHWVRQAPGKGLEWVAVISYDGSNKYYADSVKGRFTISRDNSKNTLYLQMNSLRAEDAVYYCARPSGGSYYSWFDPWGQGTLVTVSS

SEQ ID NO: 1661 - protein, 120 aa, Artificial Sequence
  Synthetic polypeptide
QVQLVQSGAEVKKPGASVKVSCKVSGYTLTELSMHWVRQAPGKGLEWMGGFDPEDGETIYAQKFQGRVTMTEDTSTDTAYMELSSLRSEDAVYYCATAPAAIATNWFDPWGQGTLVTVSS

SEQ ID NO: 1662 - protein, 120 aa, Artificial Sequence
  Synthetic polypeptide
QVQLVESGGGVVQPGRSLRLSCAASGFTFSSYAMHWVRQAPGKGLEWVAVISYDGSNKYYADSVKGRFTISRDNSKNTLYLQMNSLRAEDAVYYCARPNSGSYLSNFDYWGQGTLVTVSS

SEQ ID NO: 1663 - protein, 120 aa, Artificial Sequence
  Synthetic polypeptide
QVQLVESGGGVVQPGRSLRLSCAASGFTFSSYAMHWVRQAPGKGLEWVAVISYDGSNKYYADSVKGRFTISRDNSKNTLYLQMNSLRAEDAVYYCARPGGGSYFGAFDYWGQGTLVTVSS

SEQ ID NO: 1664 - protein, 120 aa, Artificial Sequence
  Synthetic polypeptide
QVQLVESGGGVVQPGRSLRLSCAASGFTFSSYAMHWVRQAPGKGLEWVAVISYDGSNKYYADSVKGRFTISRDNSKNTLYLQMNSLRAEDAVYYCASAAMGSYYYGMDVWGQGTTVTVSS

SEQ ID NO: 1665 - protein, 120 aa, Artificial Sequence
  Synthetic polypeptide
QVQLVESGGGVVQPGRSLRLSCAASGFTFSSYAMHWVRQAPGKGLEWVAVISYDGSNKYYADSVKGRFTISRDNSKNTLYLQMNSLRAEDAVYYCARSTGGSYYGGFDYWGQGTLVTVSS

SEQ ID NO: 1666 - protein, 120 aa, Artificial Sequence
  Synthetic polypeptide
QVQLVESGGGVVQPGRSLRLSCAASGFTLSSYAMHWVRQAPGMGLEWVAVISYDGSNKYYADSVQGRFTISRDNSKNTLYLQMNSLRAEDAVYYCARGYSGSYLTYFQHWGQGTLVTVSS

SEQ ID NO: 1667 - protein, 120 aa, Artificial Sequence
  Synthetic polypeptide
EVQLVESGGGLVQPGGSLRLSCAASGFTFSSYSMNWVRQAPGKGLEWVSYISSSSSTIYYADSVKGRFTISRDNAKNSLYLQMNSLRAEDAVYYCARVSLYYYYYGMDVWGQGTTVTVSS

SEQ ID NO: 1668 - protein, 120 aa, Artificial Sequence
  Synthetic polypeptide
EVQLVESGGGLVQPGRSLRLSCAASGFTFDDYAMHWVRQAPGKGLEWVSGISWNSGSIGYADSVKGRFTISRDNAKNSLYLQMNSLRAEDALYYCAKDMYSSGWYVLDYWGQGTLVTVSS

SEQ ID NO: 1669 - protein, 120 aa, Artificial Sequence
  Synthetic polypeptide
QVQLVESGGGVVQPGRSLRLSCAASGFTFSSYGMHWVRQAPGKGLEWVAVIWYDGSNKYYADSVKGRFTISRDNSKNTLYLQMNSLRAEDAVYYCAREGVTTVVTGLDYWGQGTLVTVSS

SEQ ID NO: 1670 - protein, 120 aa, Artificial Sequence
  Synthetic polypeptide
QVQLVESGGGVVQPGRSLRLSCAASGFTFSSYGMHWVRQAPGKGLEWVAVISYDGSNKYYADSVKGRFTISRDNSKNTLYLQMNSLRAEDAVYYCAKPSFGGYYYGMDVWGQGTTVTVSS

SEQ ID NO: 1671 - protein, 120 aa, Artificial Sequence
  Synthetic polypeptide
QVQLVQSGAEVKKPGASVKVSCKVSGYTLTELSMHWVRQAPGKGLEWMGGFDPEDGETIYAQKFQGRVTMTEDTSTDTAYVELSSLRSEDAVYYCATGTTVVTPGWFDPWGQGTLVTVSS

SEQ ID NO: 1672 - protein, 120 aa, Artificial Sequence
  Synthetic polypeptide
QVQLVQSGAEVKKPGASVKVSCKVSGYTLTELSMHWVRQAPGKGLEWMGGFDPEDGETIYAQKFQGRVTMTEDTSTDTAYMELSSLRSEDAVYYCATGSVVAATHWFDPWGQGTLVTVSS

SEQ ID NO: 1673 - protein, 119 aa, Artificial Sequence
  Synthetic polypeptide
EVQLVESGGGLIQPGGSLRLSCAASGFTVSSNYMSWVRQAPGKGLEWVSVIYSGGSTYYADSVKGRFTISRDNSKNTLYLQMNSLRAEDAVYYCARVGSSGWYNWFDPWGQGTLVTVSS

SEQ ID NO: 1674 - protein, 120 aa, Artificial Sequence
  Synthetic polypeptide
QVQLVESGGGVVQPGRSLRLSCAASGFTFSSYGMHWVRQAPGKGLEWVAVISYDGSNKYYADSVKGRFTISRDNSKNTLYLQMNSLRAEDAVYYCAKSRSGSYSSSFDYWGQGTLVTVSS

SEQ ID NO: 1675 - protein, 120 aa, Artificial Sequence
  Synthetic polypeptide
  MOD_RES (50)..(50): Any amino acid
  MOD_RES (54)..(55): Any amino acid
  MOD_RES (70)..(70): Any amino acid
QVQLVESGGGVVQPGRSLRLSCAASGFTFSSYGMHWVRQAPGKGLEWVAXISYXXSNKYYADSVKGRFTXSRDNSKNTLYLQMNSLRAEDAVYYCAKLRSGSYYGAFDIWGQGTMVTVSS

SEQ ID NO: 1676 - protein, 120 aa, Artificial Sequence
  Synthetic polypeptide
QVQLVESGGGVVQPGRSLRLSCAASGFTFSSYAMHWVRQAPGKGLEWVAVISYDGSNKYYADSVKGRFTISRDNSKNTLYLQMNSLRAEDAVYYCARSLSGSYFGGFDYWGQGTLVTVSS

SEQ ID NO: 1677 - protein, 120 aa, Artificial Sequence
  Synthetic polypeptide
QVQLVESGGGVVQPGRSLRLSCAASGFTFSSYGMHWVRQAPGKGLEWVAVIWYNGSNKYYADSVKGRFTISRDNSKNTLYLQMNSLRAEDAVYYCARIYSGSYLGRFDYWGQGTLVTVSS

SEQ ID NO: 1678 - protein, 120 aa, Artificial Sequence
  Synthetic polypeptide
QVQLVESGGGVVQPGRSLRLSCAASGFTFSSYAMHWVRQAPGKGLEWVAVISYDGSNKYYADSVKGRFTISRDNSKNTLYLQMNSLRAEDAVYYCARSGSGSYYSHSDYWGQGTLVTVSS

SEQ ID NO: 1679 - protein, 120 aa, Artificial Sequence
  Synthetic polypeptide
QVQLVESGGGVVQPGRSLRLSCAASGFTFSSYGMHWVRQAPGKGLEWVAVIWYDGSNKYYADSVKGRFTISRDNSKNTLYLQMNSLRAEDAVYYCARDLVVPYYYGMDVWGQGTTVTVSS

SEQ ID NO: 1680 - protein, 120 aa, Artificial Sequence
  Synthetic polypeptide
QVQLVESGGGVVQPGRSLRLSCAASGFTFSSYAMHWVRQAPGKGLEWVAVISYDGSNKYYADSVKGRFTISRDNSKNTLYLQMNSLRAEDAVYYCARANKATYYYGMDVWGQGTTVTVSS

SEQ ID NO: 1681 - protein, 120 aa, Artificial Sequence
  Synthetic polypeptide
QVQLVESGGGVVQPGRSLRLSCAASGFTFSSYAMHWVRQAPGKGLEWVAVISYDGSNKYYADSVKGRFTISRDNSKNTLYLQTNSLRAEDAVYSCARSSRGSYYDAFDIWGQGTLVTVSS

SEQ ID NO: 1682 - protein, 120 aa, Artificial Sequence
  Synthetic polypeptide
QVQLVESGGGVVQPGRSLRLSCAASGFTFSSYAMHWVRQAPGKGLEWVAVISYDGSNKYYADSVKGRFTISRDNSKNTLYLQMNSLRAEDAVYYCARVKGGSYWDAFDIWGQGTMVTVSS

SEQ ID NO: 1683 - protein, 120 aa, Artificial Sequence
  Synthetic polypeptide
QVQLVESGGGVVQPGRSLRLSCAASGFTFSSYAMHWVRQAPGKGLEWVAVISYDGSNKYYADSVKGRFTISRDNSKNTLYLQMNSLRAEDAVYYCARALGGSYGAPFDYWGQGTLVTVSS

SEQ ID NO: 1684 - protein, 120 aa, Artificial Sequence
  Synthetic polypeptide
QVQLVESGGGVVQPGRSLRLSCAASGFTFSSYAMHWVRQAPGKGLEWVAVISYDGSNKYYADSVKGRFTISRDNSKNTLYLQMNSLRAEDAVYYCARDKSGSYVFLFDYWGQGTLVTVSS

SEQ ID NO: 1685 - protein, 120 aa, Artificial Sequence
  Synthetic polypeptide
QVQLVESGGGVVQPGRSLRLSCAASGFTFSYNAIHWVRQAPGKGLEWVAVISFDGSNKYYADSVKGRFTISRDNSKNTVYLQMNSLRPEDAVYYCARPNSGSYTDYFDYWGQGTLVTVSS

SEQ ID NO: 1686 - protein, 120 aa, Artificial Sequence
  Synthetic polypeptide
QVQLVESGGGVVQPGRSLRLSCAASGFTFSSYAMHWVRQAPGKGLEWVAVISYDGSNKYYADSVKGRFTISRDNSKNTLYLQMNSLRAEDAVYYCARVLGGSYYSGMDVWGQGTTVTVSS

SEQ ID NO: 1687 - protein, 120 aa, Artificial Sequence
  Synthetic polypeptide
QVQLVESGGGVVQPGRSLRLSCAASGFTFSSYAMHWVRQAPGKGLEWVAVISYDGSNKYYADSVKGRFTISRDNSKNTLYLQMNSLRAEDAVYYCARPRGGSYTGYVDYWGQGTLVTVSS

SEQ ID NO: 1688 - protein, 120 aa, Artificial Sequence
  Synthetic polypeptide
QVQLVESGGGVVQPGRSLRLSCAAPGFTFSSYAMHWVRPAPGKGPQWVAVISYAGSNQYYAASVKGRFTISRDNSKNTLYLQMNSLRAEDAVYYCARSSSGSYRSYFDYWGQGTLVTVSS

SEQ ID NO: 1689 - protein, 120 aa, Artificial Sequence
  Synthetic polypeptide
EVQLVESGGGLVKPGGSLRLSCAASGFTFSSYSMNWVRQAPGKGLEWVSSISSSSSYIYYADSVKGRFTISRDNAKNSLYLQMNSLRAEDAVYYCAGGYYYYYYYGMDVWGQGTTVTVSS

SEQ ID NO: 1690 - protein, 120 aa, Artificial Sequence
  Synthetic polypeptide
QVQLVESGGGVVQPGRSLRLSCAASGFIFSSYAMYWVRQAPGKGLEWVAVISYDGSNKYYADSVKGRFTISRDNSKNTLYLQMNSLRAEDAVYYCARVSSGSYRGAFDIWGQGTMVTVSS

SEQ ID NO: 1691 - protein, 120 aa, Artificial Sequence
  Synthetic polypeptide
QVQLVESGGGVVQPGRSLRLSCAASGFTFSSYAMHWVRQAPGKGLEWVAVISYDGSNKYYADSVKGRFTISRDNSKNTLYLQMNSLRAEDAMYYCARSLWGSYRSPFDYWGQGTLVTVSS

SEQ ID NO: 1692 - protein, 120 aa, Artificial Sequence
  Synthetic polypeptide
QVQLVESGGGVVQPGRSLRLSCAASGFTFSSYGMHWVRQAPGKGLEWVAVISYDGSNKYYADSVKGRFTISRDNSKNTLYLQMNSLRAEDAVYYCARVKSGSYRGVFDYWGQGTLVTVSS

SEQ ID NO: 1693 - protein, 120 aa, Artificial Sequence
  Synthetic polypeptide
QVQLVESGGGVVQPGRSLRLSCAASGFTFSSYAMHWVRQAPGKGLEWVAVISYDGSNKYYADSVKGRFTISRDNSKNTLYLQMNSLRAEDAVYYCARAQSGSYWNAFDIWGQGTMVTVSS

SEQ ID NO: 1694 - protein, 120 aa, Artificial Sequence
  Synthetic polypeptide
QVQLVQSGAEVKKPGASVKVSCKVSGYTLTELSMHWVRQAPGKGLEWMGGFDPEDGETIYAQKFQGRVTMTEDTSTDTAYMELSSLRSEDAVYYCASVLAIFGVVYFDYWGQGTLVTVSS

SEQ ID NO: 1695 - protein, 120 aa, Artificial Sequence
  Synthetic polypeptide
QVQLVESGGGVVQPGRSLRLSCAASGFTFSSYGMHWVRQAPGKGLEWVAVIWYDGSNKYYADSVKGRFTISRDNSKNTLYLQMNSLRAEDAVYYCARDIAVAGEDAFDIWGQGTMVTVSS

SEQ ID NO: 1696 - protein, 120 aa, Artificial Sequence
  Synthetic polypeptide
QVQLVESGGGVVQPGRSLRLSCAASGFTFSSYGMHWVRQAPGKGLEWVAVISYDGSNKYYADSVKGRFTISRDNSKNTLYLQMNSLRAEDAVYYCAKANYANYYYGMDVWGQGTTVTVSS

SEQ ID NO: 1697 - protein, 120 aa, Artificial Sequence
  Synthetic polypeptide
EVQLVESGGGLVKPGGSLRLSCAASGFTFSSYSMNWVRQAPGKGLEWVSSISSSSSYIYYADSVKGRFTISRDNAKNSLYLQMNSLRAEDAVYYCARDSYDFWSGYPDYWGQGTLVTVSS

SEQ ID NO: 1698 - protein, 120 aa, Artificial Sequence
  Synthetic polypeptide
EVQLVESGGGLVQPGGSLRLSCAASGFSFSDYWMHWVRQAPGKGLVWVSRINTYGNSTNYADSVRGRFTVSRDNAKNTLYLQMNSLRAEDAVYYCARPGSGSYYSYFDYWGQGTLVTVSS

SEQ ID NO: 1699 - protein, 120 aa, Artificial Sequence
  Synthetic polypeptide
QVQLVESGGGVVQPGRSLRLSCAASGFTFSSYAMHWVRQAPGKGLEWVAVISYDGSNKYYADSVKGRFTISRDNSKNTLYLQMNSLRAEDAVYYCARDLVGGYSYYFDYWGQGTLVTVSS

SEQ ID NO: 1700 - protein, 119 aa, Artificial Sequence
  Synthetic polypeptide
EVQLVESGGGLIQPGGSLRLSCAASGFTVSSNYMSWVRQAPGKGLEWVSVIYSGGSTYYADSVKGRFTISRDNSKNTLYLQMNSLRAEDAVYYCARGGGSGWSYYFDYWGQGALVTVSS

SEQ ID NO: 1701 - protein, 120 aa, Artificial Sequence
  Synthetic polypeptide
QVQLVESGGGVVQPGRSLRLSCAASGFTFSSYGMHWVRQAPGKGLEWVAVISYDGSNKYYADSVKGRFTISRDNSKNTLYLQMNSLRAEDAVYYCAKSLGGSYYSAFDIWGQGTMVTVSS

SEQ ID NO: 1702 - protein, 119 aa, Artificial Sequence
  Synthetic polypeptide
EVQLVESGGGLIQPGGSLRLSCAASGITVSTNYMNWVRQAPGKGLEWVSVIYSGGSTYYADSVKGRFTISRDNSKNTLYLQMNSLRAEDAVYYCARAKGGSYYYGMDVWGQGTTVTVSS

SEQ ID NO: 1703 - protein, 120 aa, Artificial Sequence
  Synthetic polypeptide
RVTLRESGPALVKPTQTLTLTCTFSGFSLSTSGMCVSWIRQPPGKALEWLARIDWDDDKYYSTSLKTRLTISKDTSKNQVVLTMTNMDPVDATYYCARIHVAAAGIPFDSWGQGTLVTVS

SEQ ID NO: 1704 - protein, 119 aa, Artificial Sequence
  Synthetic polypeptide
EVQLVESGGGLVQPGGSLRLSCAASGFTFSSYDMHWVRQATGKGLEWVSAIGTAGDPYYPGSVKGRFTISRENAKNSLYLQMNSLRAGDAVYYCARGGYSSRYWYFDLWGRGTLVTVSS

SEQ ID NO: 1705 - protein, 119 aa, Artificial Sequence
  Synthetic polypeptide
QVQLQQWGAGLLKPSETLSLTCAVYGGSFSGYYWSWIRQPPGKGLEWIGEINHSGSTNYNPSLKSRVTISVDTPKNQFSLKVRSVTAADAVYYCARGLRFLEWFYFDYWGQGTLVTVSS

SEQ ID NO: 1706 - protein, 121 aa, Artificial Sequence
  Synthetic polypeptide
EVQLVESGGGLVKPGGSLRLSCAASGFTFSSYSMNWVRQAPGKGLEWVSSISSSSSYIYYADSVKGRFTISRDNAKNSLYLQMNSLRAEDAVYYCARDPYYDILTGYYNYWGQGTLVTVSS

SEQ ID NO: 1707 - protein, 121 aa, Artificial Sequence
  Synthetic polypeptide
QVQLVQSGAEVKKPGASVKVSCKVSGYTLTELSMHWVRQAPGKGLEWMGGFDPEDGETIYAQKFQGRVTMTEDTSTDTAYMELSSLRSEDAVYYCATAPGIAAAGYWFDPWGQGTLVTVSS

SEQ ID NO: 1708 - protein, 121 aa, Artificial Sequence
  Synthetic polypeptide
EVQLVESGGGLVKPGGSLRLSCAASGFTFSSYSMNWVRQAPGKGLEWVSSISSSSSYIYYADSVKGRFTISRDNAKNSLYLQMNSLRAEDAVYYCARGSYYYDSSGYVDYWGQGTLVTVSS

SEQ ID NO: 1709 - protein, 121 aa, Artificial Sequence
  Synthetic polypeptide
EVQLVQSGAEVKKPGESLKISCKGSGYSFSDYWVAWVRQMPGKGLEWMGIMYPGDSDLRYSPSFRGQVIISVDKSISTAYLQWRSLKASDAMYYCARAPTSISNPYYFDHWGQGTLVTVSS

SEQ ID NO: 1710 - protein, 121 aa, Artificial Sequence
  Synthetic polypeptide
QVQLVQSGAEVKKPGASVKVSCKVSGYTLTELSMHWVRQAPGKGLEWMGGFDPEDGETIYAQKFQGRVTMTEDTSTDTAYMELSSLRSEDAVYYCATGPVVPAAIGWFDPWGQGTLVTVSS

SEQ ID NO: 1711 - protein, 121 aa, Artificial Sequence
  Synthetic polypeptide
QVQLVQSGAEVKKPGSSVKVSCKASGGTFSSYAISWVRQAPGQGLEWMGGIIPIFGTANYAQKFQGRVTITADESTSTAYMELSSLRSEDAVYYCARVDYYDSSGYYRDYWGQGTLVTVSS

SEQ ID NO: 1712 - protein, 121 aa, Artificial Sequence
  Synthetic polypeptide
QVQLVESGGGVVQPGRSLRLSCAASGFTFSSYGMHWVRQAPGKGLEWVAVISYDGSNKYYADSVKGRFTISRDNSKNTLYLQMNSLRAEDAVYYCAKGDWYSSSWYPFDYWGQGTLVTVSS

SEQ ID NO: 1713 - protein, 121 aa, Artificial Sequence
  Synthetic polypeptide
EVQLLESGGGLVQPGGSLRLSCAASGFTFSSYAMSWVRQAPGKGLEWVSAISGSGGSTYYADSVKGRFTISRDNSKNTLYLQMNSLRAEDAVYYCAKDERRYDILTGYDYWGQGTLVTVSS

SEQ ID NO: 1714 - protein, 121 aa, Artificial Sequence
  Synthetic polypeptide
EVQLVESGGGLVKPGGSLRLSCAASGFTFSSYSMNWVRQAPGKGLEWVSSISSSSSYIYYADSVKGRFTISRDNAKNSLYLQMNSLRAEDAVYYCARDGYYDILTGYYSAWGQGTLVTVSS

SEQ ID NO: 1715 - protein, 121 aa, Artificial Sequence
  Synthetic polypeptide
QVQLVESGGGVVQPGRSLRLSCAASGFTFSSYGMHWVRQAPGKGLEWVAVISYDGSNKYYADSVKGRFTISRDNSKNTLYLQMNSLRAEDAVYYCAKDLGPDYGDYGPDYWGQGTLVTVSS

SEQ ID NO: 1716 - protein, 121 aa, Artificial Sequence
  Synthetic polypeptide
QVQLVESGGGVVQPGRSLRLSCAASGFTFSSYGMHWVRQAPGKGLEWVAVIWYDGSNKYYADSVKGRFTISRDNSKNTLYLQMNSLRAEDAVYYCARDGSGSYLYYGMDVWGQGTTVTVSS

SEQ ID NO: 1717 - protein, 121 aa, Artificial Sequence
  Synthetic polypeptide
QVQLVQSGAEVKKPGSSVKVSCKASGGTFSSYAISWVRQAPGQGLEWMGGIIPIFGTANYAQKFQGRVTITADESTSTAYMELSSLRSEDAVYYCARDSGYDSSGYYEDYWGQGTLVTVSS

SEQ ID NO: 1718 - protein, 121 aa, Artificial Sequence
  Synthetic polypeptide
EVQLVESGGGLVKPGGSLRLSCAASGFTFSSYSMNWVRQAPGKGLEWVSSISSSSSYIYYADSVKGRFTISRDNAKNSLYLQMNSLRAEDAVYYCARDSHYYDSSGLLDYWGQGTLVTVSS

SEQ ID NO: 1719 - protein, 120 aa, Artificial Sequence
  Synthetic polypeptide
QVQLQESGPGLVKPSETLSLTCTVSGGSISSYYWSWIRQPPGKGLEWIGYIYYSGSTNYNPSLKSRVTISVDTSKNQFSLKLSSVTAADAVYYCARVGCSSTSCYQFDYWGQGTLVTVSS

SEQ ID NO: 1720 - protein, 121 aa, Artificial Sequence
  Synthetic polypeptide
QVQLVESGGGVVQPGRSLRLSCAASGFTFSSYGMHWVRQAPGKGLEWVAVIWYDGSNKYYADSVKGRFTISRDNSKNTLYLQMNSLRAEDAVYYCARDSYDSSGWDWFDPWGQGTLVTVSS

SEQ ID NO: 1721 - protein, 121 aa, Artificial Sequence
  Synthetic polypeptide
EVQLVESGGVVVQPGGSLRLSCAASGFTFDDYTMHWVRQAPGKGLEWVSLISWDGGSTYYADSVKGRFTISRDNSKNSLYLQMNSLRTEDALYYCAKDMTAFSYYYGMDVWGQGTTVTVSS

SEQ ID NO: 1722 - protein, 121 aa, Artificial Sequence
  Synthetic polypeptide
EVQLVESGGGLVKPGGSLRLSCAASGFTFSSYSMNWVRQAPGKGLEWVSSISSSSSYIYYADSVKGRFTISRDNAKNSLYLQMNSLRAEDAVYYCARDLMTTVTTGWFDPWGQGTLVTVSS

SEQ ID NO: 1723 - protein, 121 aa, Artificial Sequence
  Synthetic polypeptide
EVQLLESGGGLVQPGGSLRLSCAASGFTFSSYAMSWVRQAPGKGLEWVSAISGSGGSTYYADSVKGRFTISRDNSKNTLYLQMNSLRAEDAVYYCAKDSPLYDILTGYDYWGQGTLVTVSS

SEQ ID NO: 1724 - protein, 121 aa, Artificial Sequence
  Synthetic polypeptide
EVQLLESGGGLVQPGGSLRLSCAASGFTFSSYAMSWVRQAPGKGLEWVSAISGSGGSTYYADSVKGRFTISRDNSKNTLYLQMNSLRAEDAVYYCAKNPEPYDYGDYFDYWGQGTLVTVSS

SEQ ID NO: 1725 - protein, 121 aa, Artificial Sequence
  Synthetic polypeptide
EVQLVESGGGLVKPGGSLRLSCAASGFTFSSYSMNWVRQAPGKGLEWVSSISSSSSYIYYADSVKGRFTISRDNAKNSLYLQMNSLRAEDAVYYCARDAHYDILTGYWDYWGQGTLVTVSS

SEQ ID NO: 1726 - protein, 121 aa, Artificial Sequence
  Synthetic polypeptide
QVQLVESGGGVVQPGRSLRLSCAASGFTFSSYGMHWVRQAPGKGLEWVAVISYDGSNKYYADSVKGRFTISRDNSKNTLYLQMNSLRAEDAVYYCAKALYYYGSGSYLDYWGQGTLVTVSS

SEQ ID NO: 1727 - protein, 121 aa, Artificial Sequence
  Synthetic polypeptide
EVQLVESGGGLVKPGGSLRLSCAASGFTFSSYSMNWVRQAPGKGLEWVSSISSSSSYIYYADSVKGRFTISRDNAKNSLYLQMNSLRAEDAVYYCARGPHYYDSSGYFDYWGQGTLVTVSS

SEQ ID NO: 1728 - protein, 121 aa, Artificial Sequence
  Synthetic polypeptide
QVQLVQSGAEVKKPGASVKVSCKASGYTFTGYYMHWVRQAPGQGLEWMGWINPNSGGTNYAQKFQGRVTMTRDTSISTAYMELSRLRSDDAVYYCARDLSIAAAGTAFDYWGQGTLVTVSS

SEQ ID NO: 1729 - protein, 120 aa, Artificial Sequence
  Synthetic polypeptide
QVQLQESGPGLVKPSETLSLTCTVSGGSISSYYWSWIRQPPGKGLEWIGYIYYSGSTNYNPSLKSRVTISVDTSKNQFSLKLSSVTAADAVYYCARVGCSSTSCSAFDIWGQGTMVTVSS

SEQ ID NO: 1730 - protein, 121 aa, Artificial Sequence
  Synthetic polypeptide
QVQLVESGGGVVQPGRSLRLSCAASGFTFSSYGMHWVRQAPGKGLEWVAVIWYDGSNKYYADSVKGRFTISRDNSKNTLYLQMNSLRAEDAVYYCAREGRFGELSGAFDIWGQGTMVTVSS

SEQ ID NO: 1731 - protein, 121 aa, Artificial Sequence
  Synthetic polypeptide
QVQLVESGGGVVQPGRSLRLSCAASGFTFSSYGMHWVRQAPGKGLEWVAVISYDGSNKYYADSVKGRFTISRDNSKNTLYLQMNSLRAEDAVYYCAKDRSGSYGYYGMDVWGQGTTVTVSS

SEQ ID NO: 1732 - protein, 121 aa, Artificial Sequence
  Synthetic polypeptide
QVQLVQSGAEVKKPGASVKVSCKASGYTFTSYYMHWVRQAPGQGLEWMGIINPSGGSTSYAQKFQGRVTMTRDTSTSTVYMELSSLRSEDAVYYCARDIVVVPAAYGMDVWGQGTTVTVSS

SEQ ID NO: 1733 - protein, 120 aa, Artificial Sequence
  Synthetic polypeptide
QVQLQESGPGLVKPSETLSLTCTVSGGSISSYYWSWIRQPPGKGLEWIGYIYYSGSTNYNPSLKSRVTISVDTSKNQFSLKLSSVTAADAVYYCARGYCSSTSCYQFDPWGQGTLVTVSS

SEQ ID NO: 1734 - protein, 120 aa, Artificial Sequence
  Synthetic polypeptide
QVQLQQWGAGLLKPSETLSLTCAVYGGSFSGYYWSWIRQPPGKGLEWIGEINHSGSTNYNPSLKSRVTISVDTSKNQFSLKLSSVTAADAVYYCARGLGGPDYYYGMDVWGQGTTVTVSS

SEQ ID NO: 1735 - protein, 121 aa, Artificial Sequence
  Synthetic polypeptide
QVQLVQSGAEVKKPGASVKVSCKASGYTFTSYYMHWVRQAPGQGLEWMGIINPSGGSTSYAQKFQGRVTMTRDTSTSTVYMELSSLRSEDAVYYCARAMVRGVIVYYFDYWGQGTLVTVSS

SEQ ID NO: 1736 - protein, 122 aa, Artificial Sequence
  Synthetic polypeptide
QITLKESGPTLVKPTQTLTLTCTFSGFSLSTSGVGVGWIRQPPGKALEWLALIYWNDDKRYSPSLKSRLTITKDTSKNQVVLTMTNMDPVDATYYCAHTYYYDSSGYDFDYWGQGTLVTVSS

SEQ ID NO: 1737 - protein, 120 aa, Artificial Sequence
  Synthetic polypeptide
QVQLQESGPGLVKPSETLSLTCTVSGGSISSHYWSWIRQPPGKGLEWIGYIYYSGSTNYNPSLKSRVTISVDTSKNQFSLKLSSVTAADAVYYCARGGRPPYYYYYMDVWGKGTTVTVSS

SEQ ID NO: 1738 - protein, 121 aa, Artificial Sequence
  Synthetic polypeptide
EVQLVESGGGLVQPGRSLRLSCAASGFTFDDYAMHWVRQAPGKGLEWVSGISWNSGSIGYADSVKGRFTISRDNAKNSLYLQMNSLRAEDALYYCAKDIEGDYYYYGMDVWGQGTTVTVSS

SEQ ID NO: 1739 - protein, 121 aa, Artificial Sequence
  Synthetic polypeptide
QVQLVESGGGVVQPGRSLRLSCAASGFTFSSYGMHWVRQAPGKGPEWVAVISYDGSNKYYADSVKGRFTISRDNSKNTLYLQMNSLRAEDAVYYCAKGGWYYDSSGYLDYWGQGTLVTVSS

SEQ ID NO: 1740 - protein, 121 aa, Artificial Sequence
  Synthetic polypeptide
QVQLVESGGGVVQPGRSLRLSCAASGFTFSSYGMHWVRQAPGKGLEWVAVIWYDGSNKYYADSVKGRFTISRDNSKNTLYLQMNSLRAEDAVYYCAREGLYGDYGGGFDYWGQGTLVTVSS

SEQ ID NO: 1741 - protein, 121 aa, Artificial Sequence
  Synthetic polypeptide
EVQLVESGGGLVQPGGSLRLSCAASGFTFSSYWMSWVRQAPGKGLEWVANIKQDGSEKYYVDSVKGRFTISRDNAKNSLYLQMNSLRAEDAVYYCARDMDSSGYYYGMDVWGQGTTVTVSS

SEQ ID NO: 1742 - protein, 121 aa, Artificial Sequence
  Synthetic polypeptide
QVQLVESGGGLVKPGGSLRLSCAASGFTFSDYYMSWIRQAPGKGLEWVSYISSSGSTIYYADSVKGRFTISRDNAKNSLYLQMNSLRAEDAVYYCARDGDSGSYYVWFDPWGQGTLVTVSS

SEQ ID NO: 1743 - protein, 121 aa, Artificial Sequence
  Synthetic polypeptide
QVQLVQSGAEVKKPGASVKVSCKASGYTFTSYGISWVRQAPGQGLEWMGWISAYNGNTNYAQKLQGRVTMTTDTSTSTAYMELRSLRSDDAVYYCARVLLWFGELSGNDYWGQGTLVTVSS

SEQ ID NO: 1744 - protein, 121 aa, Artificial Sequence
  Synthetic polypeptide
EVQLLESGGGLVQPGGSLRLSCAASGFTFSSYAMSWVRQAPGKGLEWVSAISGSGGSTYYADSVKGRFTISRDNSKNTLYLQMNSLRAEDAVYYCAKVVGDSSGNNWFDPWGQGTLVTVSS

SEQ ID NO: 1745 - protein, 121 aa, Artificial Sequence
  Synthetic polypeptide
QVQLVESGGGVVQPGRSLRLSCAASGFTFSSYAMHWVRQAPGKGLEWVAVISYDGSNKYYADSVKGRFTISRDNSKNTLYLQMNSLRAEDAVYYCASLRGGGYSYAPFDYWGQGTLVTVSS

SEQ ID NO: 1746 - protein, 121 aa, Artificial Sequence
  Synthetic polypeptide
QVQLVESGGGVVQPGRSLRLSCAASGFTFSSYGMHWVRQAPGKGLEWVAVISYDGSNKYYADSVKGRFTISRDNSKNTLYLQMNSLRAEDAVYYCAKDCGYSYGYSWFDPWGQGTLVTVSS

SEQ ID NO: 1747 - protein, 121 aa, Artificial Sequence
  Synthetic polypeptide
QVQLVESGGGVVQPGRSLRLSCAASGFTFSSYAMHWVRQAPGKGMEWVAVISYDGSNKYYADSVKGRFTISRDNSKNTLYLQMNSLRAEDAVYYCARAAASGSYFNWFDPWGQGTLVTVSS

SEQ ID NO: 1748 - protein, 121 aa, Artificial Sequence
  Synthetic polypeptide
QVQLVQSGAEVKKPGSSVKVSCKASGGTFSSYTISWVRQAPGQGLEWMGRIIPILGIANYAQKFQGRVTITADKSTSTAYMELSSLRSEDAVYYCARGGETYYYYYGMDVWGQGTTVTVSS

SEQ ID NO: 1749 - protein, 121 aa, Artificial Sequence
  Synthetic polypeptide
EVQLLESGGGLVQPGGSLRLSCAASGFTFSSYAMSWVRQAPGKGLEWVSAISGSGGSTYYADSVKGRFTISRDNSKNTLYLQMNSLRAEDAVYYCAKDTFGGVIVSLFDYWGQGTLVTVSS

SEQ ID NO: 1750 - protein, 121 aa, Artificial Sequence
  Synthetic polypeptide
EVQLVESGGGLVKPGGSLRLSCAASGFTFSSYSMNWVRQAPGKGLEWVSSISSSSSYIYYADSVKGRFTISRDNAKNSLYLQMNSLRAEDAVYYCARGPHYYDSSGPAGYWGQGTLVTVSS

SEQ ID NO: 1751 - protein, 122 aa, Artificial Sequence
  Synthetic polypeptide
QVQLVQSGAEVKKPGASVKVSCKVSGYTLTELSMHWVRQAPGKGLEWMGGFDPEDGETIYAQKFQGRVTMTEDTSTDTAYMELSSLRSEDAVYYCRAVPAAIDYYYYGMDVWGQGTTVTVSS

SEQ ID NO: 1752 - protein, 122 aa, Artificial Sequence
  Synthetic polypeptide
EVQLVESGGGLVQPGRSLRLSCAASGFTFDDYAMHWVRQAPGKGLEWVSGISWNSGSIGYADSVKGRFTISRDNAKNSLYLQMNSLRAEDALYYCAKAYCSSTSCLNWFDPWGQGTLVTVSS

SEQ ID NO: 1753 - protein, 121 aa, Artificial Sequence
  Synthetic polypeptide
QVQLQESGPGLVKPSETLSLTCTVSGGSISSYYWSWIRQPPGKGLEWIGYIYYSGSTNYNPSLKSRVTISVDTSKNQFSLKLSSVTAADAVYYCASDYYDSSGYYYGMDVWGQGTTVTVSS

SEQ ID NO: 1754 - protein, 122 aa, Artificial Sequence
  Synthetic polypeptide
QVQLVESGGGVVQPGRSLRLSCAASGFTFSSYGMHWVRQAPGKGLEWVAVIWYDGSNKYYADSVKGRFTISRDNSKNTLYLQMNSLRAEDAVYYCAKGGYSYGYPGYYFDYWGQGTLVTVSS

SEQ ID NO: 1755 - protein, 122 aa, Artificial Sequence
  Synthetic polypeptide
QVQLVESGGGVVQPGRSLRLSCAASGFTFSSYGMHWVRQAPGKGLEWVAVIWYDGSNKYYADSVKGRFTISRDNSKNTLYLQMNSLRAEDAVYYCARDGLSSSWSEYYFDYWGQGTLVTVSS

SEQ ID NO: 1756 - protein, 122 aa, Artificial Sequence
  Synthetic polypeptide
QVQLVQSGAEVKKPGASVKVSCKVSGYTLTELSMHWVRQAPGKGLEWMGGFDPEDGETIYAQKFQGRVTMTEDTSTDTAYMELSSLRSEDAVYYCATGPGIAAAGSRWFDPWGQGTLVTVSS

SEQ ID NO: 1757 - protein, 122 aa, Artificial Sequence
  Synthetic polypeptide
QVQLVESGGGVVQPGRSLRLSCAASGFTFSSYGMHWVRQAPGKGLEWVAVISYDGSNKYYADSVKGRFTISRDNSKNTLYLQMNSLRAEDAVYYCAKDGGDDYGDYGPFDYWGQGTLVTVSS

SEQ ID NO: 1758 - protein, 122 aa, Artificial Sequence
  Synthetic polypeptide
EVQLVESGGGLVKPGGSLRLSCAASGFTFSSYSMNWVRQAPGKGLEWVSSISSSSSYIYYADSVKGRFTISRDNAKNSLYLQMNSLRAEDAVYYCAVDTATDYYYYYGMDVWGQGTTVTVSS

SEQ ID NO: 1759 - protein, 122 aa, Artificial Sequence
  Synthetic polypeptide
QVQLVESGGGVVQPGRSLRLSCAASGFTFSSYAMHWVRQAPGKGLEWVAVISYDGSNKYYADSVKGRFTISRDNSKNTLYLQMNSLRAEDAVYYCARDDYDSSGYSWGMDVWGQGTTVTVSS

SEQ ID NO: 1760 - protein, 122 aa, Artificial Sequence
  Synthetic polypeptide
QVQLVESGGGVVQPGRSLRLSCAASGFTFSSYGMHWVRQAPGKGLEWVAVIWYDGSNKYYADSVKGRFTISRDNSKNTLYLQMNSLRAEDAVYYCARDYYDSSGYSNGFDYWGQGTLVTVSS

SEQ ID NO: 1761 - protein, 122 aa, Artificial Sequence
  Synthetic polypeptide
QVQLVESGGGVVQPGRSLRLSCAASGFTFSSYGMHWVRQAPGKGLEWVAVISYDGSNKYYADSVKGRFTISRDNSKNTLYLQMNSLRAEDAVYYCAKDKDDGYYYYYYMDVWGKGTTVTVSS

SEQ ID NO: 1762 - protein, 122 aa, Artificial Sequence
  Synthetic polypeptide
QVQLVQSGAEVKKPGASVKVSCKASGYTFTGYYMHWVRQAPGQGLEWMGWINPNSGGTNYAQKFQGRVTMTRDTSISTAYMELSRLRSDDAVYYCARLGSGSYYYYYGMDVWGQGTTVTVSS

SEQ ID NO: 1763 - protein, 122 aa, Artificial Sequence
  Synthetic polypeptide
QVQLVESGGGVVQPGGSLRLSCAASGFTFSSYGMHWVRQAPGKGLEWVAFIRYDGSNKYYADSVKGRFTISRDNSKNTLYLQMNSLRAEDAVYYCAKSGYSYGYQPYYFDYWGQGTLVTVSS

SEQ ID NO: 1764 - protein, 122 aa, Artificial Sequence
  Synthetic polypeptide
QVQLVESGGGVVQPGRSLRLSCAASGFTFSSYGMHWVRQAPGKGLEWVAVISYDGSNKYYADSVKGRFTISRDNSKNTLYLQMNSLRAEDAVYYCAKDQTIVVVPAATFDYWGQGTLVTVSS

SEQ ID NO: 1765 - protein, 122 aa, Artificial Sequence
  Synthetic polypeptide
QVQLVESGGGVVQPGRSLRLSCAASGFTFSSYGMHWVRQAPGKGLEWVAVIWYDGSNKYYADSVKGRFTISRDNSKNTLYLQMNSLRAEDAVYYCARDRVGSSGWDYYFDYWGQGTLVTVSS

SEQ ID NO: 1766 - protein, 122 aa, Artificial Sequence
  Synthetic polypeptide
QVQLVESGGGVVQPGRSLRLSCAASGFTFSSYGMHWVRQAPGKGLEWVAVIWYDGSNKYYADSVKGRFTISRDNSKNTLYLQMNSLRAEDAVYYCARDYDFWSGYYGWFDPWGQGTLVTVSS

SEQ ID NO: 1767 - protein, 122 aa, Artificial Sequence
  Synthetic polypeptide
QVQLVQSGAEVKKPGASVKVSCKVSGYTLTELSMHWVRQAPGKGLEWMGGFDPEDGETIYAQKFQGRVTMTEDTSTDTAYMELSSLRSEDAVYYCATGPAIAAAATGWFDPWGQGTLVTVSS

SEQ ID NO: 1768 - protein, 122 aa, Artificial Sequence
  Synthetic polypeptide
QVQLVESGGGVVQPGRSLRLSCAASGFTFSSYAMHWVRQAPGKGLEWVAVISYDGSNKYYADSVKGRFTISRDNSKNTLYLQMNSLRAEDAVYYCARDHYDYVWGSYRYGVWGQGTLVTVSS

SEQ ID NO: 1769 - protein, 122 aa, Artificial Sequence
  Synthetic polypeptide
QVQLVQSGAEVKKPGSSVKVSCKASGGTFSSYAISWVRQAPGQGLEWMGGIIPIFGTANYAQKFQGRVTITADESTSTAYMELSSLRSEDAVYYCARGGYSSSHYYYGMDVWGQGTTVTVSS

SEQ ID NO: 1770 - protein, 121 aa, Artificial Sequence
  Synthetic polypeptide
EVQLVESGGGLIQPGGSLRLSCAASGFTVSSNYMSWVRQAPGKGLEWVSVIYSGGSTYYADSVKGRFTISRDNSKNTLYLQMNSLRAEDAVYYCARDHDILTGYSDAFDIWGQGTMVTVSS

SEQ ID NO: 1771 - protein, 122 aa, Artificial Sequence
  Synthetic polypeptide
QVQLVQSGAEVKKPGASVKVSCKVSGYTLTELSMHWVRQAPGKGLEWMGGFDPEDGETIYAQKFQGRVTMTEDTSTDTAYMELSSLRSEDAVYYCATHLAYCGGDCYSFDYWGQGTLVTVSS

SEQ ID NO: 1772 - protein, 122 aa, Artificial Sequence
  Synthetic polypeptide
QVQLVQSGAEVKKPGSSVKVSCKASGGTFSSYAISWVRQAPGQGLEWMGRIIPILGIANYAQKFQGRVTITADKSTSTAYMELSSLRSEDAVYYCARGGYYYDSSGYHMDYWGQGTLVTVSS

SEQ ID NO: 1773 - protein, 122 aa, Artificial Sequence
  Synthetic polypeptide
QVQLVESGGGVVQPGRSLRLSCAASGFTFSSYGMHWVRQAPGKGLEWVAVISYDGSNKYYADSVKGRFTISRDNSKNTLYLQMNSLRAEDAVYYCAKTVAGHYYYYYGMDVWGQGTTVTVSS

SEQ ID NO: 1774 - protein, 121 aa, Artificial Sequence
  Synthetic polypeptide
QVQLQESGPGLVKPSETLSLTCTVSGGSISSYYWSWIRQPPGKGLEWIGYIYYSGSTNYNPSLKSRVTISVDTSKNQFSLKLSSVTAADAVYYCARVHDSSGYYYPLFDYWGQGTLVTVSS

SEQ ID NO: 1775 - protein, 122 aa, Artificial Sequence
  Synthetic polypeptide
EVQLLESGGGLVQPGGSLRLSCAASGFTFSSYAMSWVRQAPGKGLEWVSAISGSGGSTYYADSVKGRFTISRDNSKNTLYLQMNSLRAEDAVYYCAKDGDSSGYYSDAFDIWGQGTMVTVSS

SEQ ID NO: 1776 - protein, 122 aa, Artificial Sequence
  Synthetic polypeptide
QVQLVESGGGVVQPGRSLRLSCAASGFTFSSYGMHWVRQAPGKGLEWVAVIWYDGSNKYYADSVKGRFTISRDNSKNTLYLQMNSLRAEDAVYYCAREGYSSSWADLYFDYWGQGTLVTVSS

SEQ ID NO: 1777 - protein, 123 aa, Artificial Sequence
  Synthetic polypeptide
QLQLQESGPGLVKPSETLSLTCTVSGGSISSSSYYWGWIRQPPGKGLEWIGSIYYSGSTYYNPSLKSRVTISVDTSKNQFSLKLSSVTAADAVYYCARLNYYDSSGYSEFDYWGQGTLVTVSS

SEQ ID NO: 1778 - protein, 121 aa, Artificial Sequence
  Synthetic polypeptide
EVQLVESGGGLVQPGGSLRLSCAASGFTFSSYDMHWVRQATGKGLEWVSAIGTAGDTYYPGSVKGRFTISRENAKNSLYLQMNSLRAGDAVYYCARAYYDSSGYYLYFDYWGQGTLVTVSS

SEQ ID NO: 1779 - protein, 122 aa, Artificial Sequence
  Synthetic polypeptide
EVQLLESGGGLVQPGGSLRLSCAASGFTFSSYAMSWVRQAPGKGLEWVSAISGSGGSTYYADSVKGRFTISRDNSKNTLYLQMNSLRAEDAVYYCAKDLEASGSYHDAFDIWGQGTMVTVSS

SEQ ID NO: 1780 - protein, 122 aa, Artificial Sequence
  Synthetic polypeptide
QVQLVQSGAEVKKPGASVKVSCKASGYTFTSYYMHWVRQAPGQGLEWMGIINPSGGSTSYAQKFQGRVTMTRDTSTSTVYMELSSLRSEDAVYYCARESAIVVVPAAPFDYWGQGTLVTVSS

SEQ ID NO: 1781 - protein, 122 aa, Artificial Sequence
  Synthetic polypeptide
QVQLVESGGGVVQPGRSLRLSCAASGFTFSSYGMHWVRQAPGKGLEWVAVISYDGSNKYYADSVKGRFTISRDNSKNTLYLQMNSLRAEDAVYYCAKGGYSYGYDRYYFDYWGQGTLVTVSS

SEQ ID NO: 1782 - protein, 122 aa, Artificial Sequence
  Synthetic polypeptide
QMQLVQSGPEVKKPGTSVKVSCKASGFTFTSSAVQWVRQARGQRLEWIGWIVVGSGNTNYAQKFQERVTITRDMSTSTAYMELSSLRSEDAVYYCAAVGCSGGSCPDAFDIWGQGTMVTVSS

SEQ ID NO: 1783 - protein, 122 aa, Artificial Sequence
  Synthetic polypeptide
EVQLVESGGGLVQPGGSLRLSCAASGFTFSSYSMNWVRQAPGKGLEWVSYISSSSSTIYYADSVKGRFTISRDNAKNSLYLQMNSLRDEDAVYYCARGVGATSYYYYGMDVWGQGTTVTVSS

SEQ ID NO: 1784 - protein, 122 aa, Artificial Sequence
  Synthetic polypeptide
QVQLVESGGGVVQPGRSLRLSCAASGFTFSSYGMHWVRQAPGKGLEWVAVIWYDGSNKYYADSVKGRFTISRDNSKNTLYLQMNSLRAEDAVYYCASNYGDYANYYYGMDVWGQGTTVTVSS

SEQ ID NO: 1785 - protein, 121 aa, Artificial Sequence
  Synthetic polypeptide
QVQLQESGPGLVKPSETLSLTCTVSGGSISSYYWSWIRQPPGKGLEWIGYIYYSGSTNYNPSLKSRVTISVDTSKNQFSLKLSSVTAADAVYYCARLYCTNGVCSGYFDYWGQGTLVTVSS

SEQ ID NO: 1786 - protein, 123 aa, Artificial Sequence
  Synthetic polypeptide
QVQLQESGPGLVKPSQTLSLTCTVSGGSISSGGYYWSWIRQHPGKGLEWIGYIYYSGSTYYNPSLKSRVTISVDTSKNQFSLKLSSVTAADAVYYCARVLGYCSSTSCYPDYWGQGTLVTVSS

SEQ ID NO: 1787 - protein, 122 aa, Artificial Sequence
  Synthetic polypeptide
EVQLVESGGGLVKPGGSLRLSCAASGFIFDSYAMNWVRQAPGKGLEWVAYISAKNTDLYYADSVKGRFTISRDYAENSVYLQMDSLRADDAVYFCARGPYYYDSSGYFFDYWGQGAQVSVSS

SEQ ID NO: 1788 - protein, 122 aa, Artificial Sequence
  Synthetic polypeptide
QVQLVQSGAEVKKPGASVKVSCKVSGYTLTELSMHWVRQAPGKGLEWMGGFDPEDGETIYAQKFQGRVTMTEDTSTDTAYMELSSLRSEDAVYYCATGPPIAVAGSNWFDPWGQGTLVTVSS

SEQ ID NO: 1789 - protein, 124 aa, Artificial Sequence
  Synthetic polypeptide
QLQLQESGPGLVKPSETLSLTCTVSGGSISSSSYYWGWIRQPPGKGLEWIGSIYYSGSTYYNPSLKSRVTISVDTSKNQFSLKLSSVTAADAVYYCARHLLWFGEFNLDAFDIWGQGTMVTVSS

SEQ ID NO: 1790 - protein, 122 aa, Artificial Sequence
  Synthetic polypeptide
EVQLVESGGGLVQPGGSLRLSCAASGFTFSSYDMHWVRQATGKGLEWVSAIGTAGDTYYPGSVKGRFTISRENAKNSLYLQMNSLRAGDAVYYCARAGEGGSYYYYYGMDVWGQGTTVTVSS

SEQ ID NO: 1791 - protein, 124 aa, Artificial Sequence
  Synthetic polypeptide
QVTLRESGPALVKPTQTLTLTCTFSGFSLSTSGMCVSWIRQPPGKALEWLALIDWDDDKYYSTSLKTRLTISKDTSKNQVVLTMTNMDPVDATYYCARTTYDILTGYYNAFDIWGQGTMVTVSS

SEQ ID NO: 1792 - protein, 124 aa, Artificial Sequence
  Synthetic polypeptide
QITLKESGPTLVKPTQTLTLTCTFSGFSLSTSGVGVGWIRQPPGKALEWLALIYWDDDKRYSPSLKSRLTITKDTSKNQVVLTMTNMDPVDATYYCAHSYYDILTGYTWAFDIWGQGTMVTVSS

SEQ ID NO: 1793 - protein, 123 aa, Artificial Sequence
  Synthetic polypeptide
EVQLVESGGGLVQPGGSLRLSCAASGFTFSSYSMNWVRQAPGKGLEWVSYISSSSSTIYYADSVKGRFTISRDNAKNSLYLQMNSLRAEDAVYYCASIAAAEGLYYYYGMDVWGQGTTVTVSS

SEQ ID NO: 1794 - protein, 124 aa, Artificial Sequence
  Synthetic polypeptide
QVQLQESGPGLVKPSQTLSLTCTVSGGSISSGGYYWSWIRQHPGKGLEWIGYIYYSGSTYYNPSLKSRVTISVDTSKNQFSLKLSSVTAADAVYYCARAPRNTIFGVVSAFDIWGQGTMVTVSS

SEQ ID NO: 1795 - protein, 124 aa, Artificial Sequence
  Synthetic polypeptide
QVQLQESGPGLVKPSQTLSLTCTVSGGSISSGGYYWSWIRQHPGKGLEWIGYIYYSGSTYYNPSLKSRVTISVDTSKNQFSLKLSSVTAADAVYYCARVPRITIFGVVQHFDYWGQGTLVTVSS

SEQ ID NO: 1796 - protein, 124 aa, Artificial Sequence
  Synthetic polypeptide
QLQLQESGPGLVKPSETLSLTCTVSGGSISSSSYYWGWIRQPPGKGLEWIGSIYYSGSTYYNPSLKSRVTISVDTSKNQFSLKLSSVTAADAVYYCARDADSSGSYYYYGMDVWGQGTTVTVSS

SEQ ID NO: 1797 - protein, 123 aa, Artificial Sequence
  Synthetic polypeptide
QVQLVQSGAEVKKPGSSVKVSCKASGGTFSSYAISWVRQAPGQGLEWMGGIIPIFGTANYAQKFQGRVTITADESTSTAYMELSSLRSEDAVYYCARTGYSSSWYYYYGMDVWGQGTTVTVSS

SEQ ID NO: 1798 - protein, 123 aa, Artificial Sequence
  Synthetic polypeptide
QVQLVQSGAEVKKPGSSVKVSCKASGGTFSSYAISWVRQAPGQGLEWMGGIIPIFGTANYAQKFQGRVTITADESTSTAYMELSSLRSEDAVYYCARGGYSYTNYYYYGMDVWGQGTTVTVSS

SEQ ID NO: 1799 - protein, 123 aa, Artificial Sequence
  Synthetic polypeptide
QVQLVESGGGVVQPGRSLRLSCAASGFTFSSYGMHWVRQAPGKGLEWVAVIWYDGSNKYYADSVKGRFTISRDNSKNTLYLQMNSLRAEDAVYYCARDRDIVVVPAAVYFDYWGQGTLVTVSS

SEQ ID NO: 1800 - protein, 123 aa, Artificial Sequence
  Synthetic polypeptide
QVQLVQSGAEVKKPGASVKVSCKVSGYTLTELSMHWVRQAPGKGLEWMGGFDPEDGETIYAQKFQGRVTMTEDTSTDTAYMELSSLRSEDAVYYCATALAYCGGDCQYYFDYWGQGTLVTVSS

SEQ ID NO: 1801 - protein, 123 aa, Artificial Sequence
  Synthetic polypeptide
QVQLVQSGAEVKKPGSSVKVSCKASGGTFSSYAISWVRQAPGQGLEWMGGIIPIFGTANYAQKFQGRVTITADESTSTAYMELSSLRSEDAVYYCARGLWSSVGYYYYYMDVWGKGTTVTVSS

SEQ ID NO: 1802 - protein, 124 aa, Artificial Sequence
  Synthetic polypeptide
QITLKESGPTLVKPTQTLTLTCTFSGFSLSTSGVGVGWIRQPPGKALEWLALIYWDDDKRYSPSLKSRLTITKDTSKNQVVLTMTNMDPVDATYYCAHLYYDILTGYSNWFDPWGQGTLVTVSS

SEQ ID NO: 1803 - protein, 123 aa, Artificial Sequence
  Synthetic polypeptide
QVQLVQSGAEVKKPGASVKVSCKASGYTFTGYYMHWVRQAPGQGLEWMGWINPNSGGTNYAQKFQGRVTMTRDTSISTAYMELSRLRSDDAVYYCAREGYSSSWYHSNWFDPWGQGTLVTVSS

SEQ ID NO: 1804 - protein, 123 aa, Artificial Sequence
  Synthetic polypeptide
EVQLVESGGGLVQPGGSLRLSCAASGFTFSSYWMSWVRQAPGKGLEWVANIKQDGSEKYYVDSVKGRFTISRDNAKNSLYLQMNSLRAEDAVYYCARDLSGYDYYYYYGMDVWGQGTTVTVSS

SEQ ID NO: 1805 - protein, 122 aa, Artificial Sequence
  Synthetic polypeptide
EVQLVESGGGLVQPGGSLRLSCAASGFTVSSNYMSWVRQAPGKGLEWVSVIYSGGSTYYADSVKGRFTISRHNSKNTLYLQMNSLRAEDAVYYCARGYCTNGVCYIDAFDIWGQGTMVTVSS

SEQ ID NO: 1806 - protein, 124 aa, Artificial Sequence
  Synthetic polypeptide
RVTLRESGPALVKPTQTLTLTCTFSGFSLSTSGMCVSWIRQPPGKALEWLARIDWDDDKYYSTSLKTRLTISKDTSKNQVVLTMTNMDPVDATYYCARTYYYDSSGYHDAFDIWGQGTMVTVSS

SEQ ID NO: 1807 - protein, 123 aa, Artificial Sequence
  Synthetic polypeptide
QVQLVQSGAEVKKPGASVKVSCKVSGYTLTELSMHWVRQAPGKGLEWMGGFDPEDGETIYAQKFQGRVTMTEDTSTDTAYMELSSLRSEDAVYYCATDFAYCGGDCYPRFDYWGQGTLVTVSS

SEQ ID NO: 1808 - protein, 123 aa, Artificial Sequence
  Synthetic polypeptide
QVQLVQSGAEVKKPGASVKVSCKVSGYTLTELSMHWVRQAPGKGLEWMGGFDPEDGETIYAQKFQGRVTMTEDTSTDTAYMELSSLRSEDAVYYCATSFAYCGGDCYSYFDYWGQGTLVTVSS

SEQ ID NO: 1809 - protein, 122 aa, Artificial Sequence
  Synthetic polypeptide
QVQLQESGPGLVKPSETLSLTCTVSGGSISSYYWSWIRQPPGKGLEWIGYIYYSGSTNYNPSLKSRVTISVDTSKNQFSLKLSSVTAADAVYYCARHYYDSSGYSALNFDYWGQGTLVTVSS

SEQ ID NO: 1810 - protein, 124 aa, Artificial Sequence
  Synthetic polypeptide
QLQLQESGPGLVKPSETLSLTCTVSGGSISSSSYYWGWIRQPPGKGLEWIGSIYYSGSTYYNPSLKSRVTISVDTSKNQFSLKLSSVTAADAVYYCAEYCSSTSCYANDAFDIWGQGTMVTVSS

SEQ ID NO: 1811 - protein, 123 aa, Artificial Sequence
  Synthetic polypeptide
QVQLVQSGAEVKKPGASVKVSCKVSGYTLTELSMHWVRQAPGKGLEWMGGFDPEDGETIYAQKFQGRVTMTEDTSTDTAYMELSSLRSEDAVYYCATAMAYCGGDCYSWFDPWGQGTLVTVSS

SEQ ID NO: 1812 - protein, 123 aa, Artificial Sequence
  Synthetic polypeptide
  MOD_RES (56)..(56): Any amino acid
  MOD_RES (106)..(106): Any amino acid
QVQLVESGGGVVQPGRSLRLSCAASGFTFSSYGMHWVRQAPGKGLEWVAVISYDGXNKYYADSVKGRFTISRDNSKNTLYLQMNSLRAEDAVYYCAKDRSGWYLYXYYGMDVWGQGTTVTVSS

SEQ ID NO: 1813 - protein, 123 aa, Artificial Sequence
  Synthetic polypeptide
QVQLVQSGAEVKKPGSSVKVSCKASGGTFSSYAISWVRQAPGQGLEWMGGIIPIFGTANYAQKFQGRVTITADESTSTAYMELSSLRSEDAVYYCARSGYSSGWKYYYGMDVWGQGTTVTVSS

SEQ ID NO: 1814 - protein, 123 aa, Artificial Sequence
  Synthetic polypeptide
QVQLVESGGGLVKPGGSLRLSCAASGFTFSDYYMSWIRQAPGKGLEWVSYISSSGSTIYYADSVKGRFTISRDNAKNSLYLQMNSLRAEDAVYYCARDQYYYDSSGYPVFDYWGQGTLVTVSS

SEQ ID NO: 1815 - protein, 124 aa, Artificial Sequence
  Synthetic polypeptide
QVTLRESGPALVKPTQTLTLTCTFSGFSLSTSGMCVSWIRQPPGKALEWLALIDWDDDKYYSTSLKTRLTISKDTSKNQVVLTMTNMDPVDATYYCARIVYDILTGYYTYFDYWGQGTLVTVSS

SEQ ID NO: 1816 - protein, 124 aa, Artificial Sequence
  Synthetic polypeptide
RVTLRESGPALVKPTQTLTLTCTFSGFSLSTSGMCVSWIRQPPGKALEWLARIDWDDDKYYSTSLKTRLTISKDTSKNQVVLTMTNMDPVDATYYCARIRYDILTGYYIGKDYWGQGTLVTVSS

SEQ ID NO: 1817 - protein, 123 aa, Artificial Sequence
  Synthetic polypeptide
EVQLLESGGGLVQPGGSLRLSCAASGFTFSSYAMSWVRQAPGKGLEWVSAISGSGGSTYYADSVKGRFTISRDNSKNTLYLQMNSLRAEDAVYYCAKDYYDSSGYYYYGMDVWGQGTTVTVSS

SEQ ID NO: 1818 - protein, 123 aa, Artificial Sequence
  Synthetic polypeptide
QVQLVQSGAEVKKPGSSVKVSCKASGGTFSSYAISWVRQAPGQGREGMGGINPIFGTAHYAQKFQGRVTITTDEATSTAYMELSSLRSEDAVYYCARKNYYDSSGYYAPFDYWGQGTLVTVSS

SEQ ID NO: 1819 - protein, 124 aa, Artificial Sequence
  Synthetic polypeptide
EVQLVESGGGLVQPGGSLRLSCAASGFTFSSYWMSWVRQAPGKGLEWVANIKQDGSEKYYVDSVKGRFTISRDNAKNSLYLQMNSLRAEDAVYYCARDTGAVAGTDYYYGMDVWGQGTTVTVSS

SEQ ID NO: 1820 - protein, 124 aa, Artificial Sequence
  Synthetic polypeptide
QVQLVQSGAEVKKPGASVKVSCKASGYTFTSYYMHWVRQAPGQGLEWMGIINPSGGSTSYAQKFQGRVTMTRDTSTSTVYMELSSLRSEDAVYYCARDLTTVTTYHYYYGMDVWGQGTTVTVSS

SEQ ID NO: 1821 - protein, 124 aa, Artificial Sequence
  Synthetic polypeptide
QVQLVESGGGLVKPGGSLRLSCAASGFTFSDYYMSWIRQAPGKGLEWVSYISSSGSTIYYADSVKGRFTISRDNAKNSLYLQMNSLRAEDAVYYCARDMIAAAGNYYYYGMDVWGQGTTVTVSS

SEQ ID NO: 1822 - protein, 123 aa, Artificial Sequence
  Synthetic polypeptide
QVQLQQWGAGLLKPSETLSLTCAVYGGSFSGYYWSWIRQPPGKGLEWIGEINHSGSTNYNPSLKSRVTISVDTSKNQFSLKLSSVTAADAVYYCARAGYSSSWYGAAEYFQHWGQGTLVTVSS

SEQ ID NO: 1823 - protein, 124 aa, Artificial Sequence
  Synthetic polypeptide
EVQLVESGGGLVKPGGSLRLSCAASGFTFSSYSMNWVRQAPGKGLEWVSSISSSSSYIYYADSVKGRFTISRDNAKNSLYLQMNSLRAEDAVYYCATLAAAGPESYYYYGMDVWGQGTTVTVSS

SEQ ID NO: 1824 - protein, 124 aa, Artificial Sequence
  Synthetic polypeptide
EVQLVESGGGLVQPGGSLRLSCAASGFTFSSYWMSWVRQAPGKGLEWVANIKQDGSEKYYVDSVKGRFTISRDNAKNSLYLQMNSLRAEDAVYYCARDEYCSSTSCYYYGMDVWGQGTTVTVSS

SEQ ID NO: 1825 - protein, 124 aa, Artificial Sequence
  Synthetic polypeptide
EVQLVESGGGLVQPGGSLRLSCAASGFTFSSYWMSWVRQAPGKGLEWVANIKQDGSEKYYVDSVKGRFTISRDNAKNSLYLQMNSLRAEDAVYYCARDLYSSEDYYYYYGMDVWGQGTTVTVSS

SEQ ID NO: 1826 - protein, 123 aa, Artificial Sequence
  Synthetic polypeptide
QVQLQQWGAGLLKPSETLSLTCAVYGGSFSGYYWSWIRQPPGKGLEWIGEINHSGSTNYNPSLKSRVTISVDTSKNQFSLKLSSVTAADAVYYCARGPYSSGWYGLKYWFDPWGQGTLVTVSS

SEQ ID NO: 1827 - protein, 123 aa, Artificial Sequence
  Synthetic polypeptide
QVQLQQWGAGLLKPSETLSLTCAVYGGSFSGYYWSWIRQPPGKGLEWIGEINHSGSTNYNPSLKSRVTISVDTSKNQFSLKLSSVTAADAVYYCARGRYSSSWYGLKYGMDVWGQGTTVTVSS

SEQ ID NO: 1828 - protein, 125 aa, Artificial Sequence
  Synthetic polypeptide
QVTLKESGPVLVKPTETLTLTCTVSGFSLSNARMGVSWIRQPPGKALEWLAHIFSNDEKSYSTSLKSRLTISKDTSKSQVVLTMTNMDPVDATYYCARIILDCSGGSCYWLGDYWGQGTLVTVSS

SEQ ID NO: 1829 - protein, 123 aa, Artificial Sequence
  Synthetic polypeptide
QVQLQESGPGLVKPSETLSLTCTVSGGSISSDYWSWIRQPPGKGLEWIGYIYYSGSTNYNPSLKSRVTISVDTSKNQFSLKLSSVTAADAVYYCARGDVGYCSGGSCYWFDPWGQGTLVTVSS

SEQ ID NO: 1830 - protein, 124 aa, Artificial Sequence
  Synthetic polypeptide
QVQLVQSGAEVKKPGSSVKVSCKASGGTFSNYAISWVRQAPGQGLEWMGGIIPIFGTANYAQKFQGRVTITADKSTSTAYMELSSLRSEDAVYYCARSGYSSSSGYYYYGMDVWGQGTTVTVSS

SEQ ID NO: 1831 - protein, 124 aa, Artificial Sequence
  Synthetic polypeptide
EVQLLESGGGLVQPGGSLRLSCAASGFTFSSYAMSWVRQAPGKGLEWVSAISGSGGSTYYADSVKGRFTISRDNSKNTLYLQMNSLRAEDAVYYCAKAEHCSGGSCYYYGMDVWGQGTTVTVSS

SEQ ID NO: 1832 - protein, 124 aa, Artificial Sequence
  Synthetic polypeptide
EVQLVESGGGLVQPGGSLRLSCAASGFTFSSYWMSWVRQAPGKGLEWVANIKQDGSEKYYVDSVKGRFTISRDNAKNSLYLQMNSLRAEDAVYYCARDIAAAGQDYYYYGMDVWGQGTTVTVSS

SEQ ID NO: 1833 - protein, 124 aa, Artificial Sequence
  Synthetic polypeptide
QVQLVESGGGVVQPGRSLRLSCAASGFTFSSYAMHWVRQAPGKGLEWVAVISYDGSNKYYADSVKGRFTISRDNSKNTLYLQMNSLRAEDAVYYCARDGSYYYDSSGYSDFDYWGQGTLVTVSS

SEQ ID NO: 1834 - protein, 123 aa, Artificial Sequence
  Synthetic polypeptide
QVQLQQWGAGLLKPSETLSLTCAVYGRSFSGYYWSWIRQPPGKGLEWIGEINHSGSTNYNPSLKSRVTISVDTSKNQFSLKLRSVTAADAVYYCARGPYSSDWYGRRDWFDPWGQGTLVTVSS

SEQ ID NO: 1835 - protein, 124 aa, Artificial Sequence
  Synthetic polypeptide
QVQLVESGGGLVKPGGSLRLSCAASGFTFSDYYMSWIRQAPGKGLEWVSYISSSGSTIYYADSVKGRFTISRDNAKNSLYLQMNSLRAEDAVYYCARDMVAVAGTYYYYGMDVWGQGTTVTVSS

SEQ ID NO: 1836 - protein, 123 aa, Artificial Sequence
  Synthetic polypeptide
QVQLQQWGAGLLKPSETLSLTCAVYGGSFSGYYWSWIRQPPGKGLEWIGEINHSGSTNYNPSLKSRVTISVDTSKNQFSLKLSSVTAADAVYYCARGRYSSSWYGARDAFDIWGQGTMVTVSS

SEQ ID NO: 1837 - protein, 123 aa, Artificial Sequence
  Synthetic polypeptide
QVQLQQWGAGLLKPSETLSLTCAVYGGSFSGYYWSWIRQPPGKGLEWIGEINHSGSTNYNPSLKSRVTISVDTSKNQFSLKLSSVTAADAVYYCARGRYSSSWYGIKSGFDPWGQGTLVTVSS

SEQ ID NO: 1838 - protein, 124 aa, Artificial Sequence
  Synthetic polypeptide
QVQLVQSGAEVKKPGASVKVSCKVSGYTLTELSMHWVRQAPGKGLEWMGGFDPEDGETIYAQKFQGRVTMTEDTSTDTAYMELSSLRSEDAVYYCATSPGYCSGGSCSNWFDPWGQGTLVTVSS

SEQ ID NO: 1839 - protein, 124 aa, Artificial Sequence
  Synthetic polypeptide
QVQLVQSGAEVKKPGASVKVSCKASGYTFTSYYMHWVRQAPGQGLEWMGIINPSGGSTSYAQKFQGRVTMTRDTSTSTVYMELSSLRSEDAVYYCARDWTAVADADYYYGMDVWGQGTTVTVSS

SEQ ID NO: 1840 - protein, 124 aa, Artificial Sequence
  Synthetic polypeptide
QVQLVQSGAEVKKPGASVKVSCKASGYTFTSYYMHWVRQAPGQGLEWMGIINPSGGSTSYAQKFQGRVTMTRDTSTSTVYMELSSLRSEDAVYYCARDLTGTTGLEYYYGMDVWGQGTTVTVSS

SEQ ID NO: 1841 - protein, 124 aa, Artificial Sequence
  Synthetic polypeptide
QVQLVQSGAEVKKPGASVKVSCKASGYTFTGYYMHWVRQAPGQGLEWMGWINPNSGGTNYAQKFQGRVTMTRDTSISTAYMELSRLRSDDAVYYCARMPYYYDSSGYRAAFDIWGQGTMVTVSS

SEQ ID NO: 1842 - protein, 123 aa, Artificial Sequence
  Synthetic polypeptide
QVQLQQWGAGLLKPSETLSLTCAVYGGSFSGYYWSWIRQPPGKGLEWIGEINHSGSTNYNPSLKSRVTISVDTSKNQFSLKLSSVTAADAVYYCARGRHSSSWYDRRSWFDPWGQGTLVTVSS

SEQ ID NO: 1843 - protein, 124 aa, Artificial Sequence
  Synthetic polypeptide
QVQLVQSGAEVKKPGSSVKVSCKASGGTFSTYAINWVRQAPGQGLEWMGGIIPIFDTANYAQKFQGRVTITADKSTSTAYMELSSLRSEDAVYYCARGGYSYGYYQYYYHMDVWGQGTTVTVSS

SEQ ID NO: 1844 - protein, 124 aa, Artificial Sequence
  Synthetic polypeptide
EVQLVESGGGLVQPGGSLRLSCAASGFTFSSYWMSWVRQAPGKGLEWVANIKQDGSEKYYVDSVKGRFTISRDNAKNSLYLQMNSLRAEDAVYYCARDGYSGSYYYYYYGMDVWGQGTTVTVSS

SEQ ID NO: 1845 - protein, 123 aa, Artificial Sequence
  Synthetic polypeptide
QVQLQQWGAGLLKPSETLSLTCAVYGGSFSGYYWSWIRQPPGKGLEWIGEINHSGSTNYNPSLKSRVTISVDTSKNQFSLKLSSVTAADAVYYCAIPHCSSTSCYYYYGMDVWGQGTTVTVSS

SEQ ID NO: 1846 - protein, 124 aa, Artificial Sequence
  Synthetic polypeptide
EVQLLESGGGLVQPGGSLRLSCAASGFTFSSYAMSWVRQAPGKGLEWVSAISGSGGSTYYADSVKGRFTISRDNSKNTLYLQMNSLRAEDAVYYCAKQYYGSGSYYKYYGMDVWGQGTTVTVSS

SEQ ID NO: 1847 - protein, 124 aa, Artificial Sequence
  Synthetic polypeptide
EVQLVESGGGLVQPGGSLRLSCAASGFTFSSYWMSWVRQAPGKGLEWVANIKQDGSEKYYVDSVKGRFTISRDNAKNSLYLQMNSLRAEDAVYYCARDSLVAAADPYYYGMDVWGQGTTVTVSS

SEQ ID NO: 1848 - protein, 124 aa, Artificial Sequence
  Synthetic polypeptide
QVQLVESGGGVVQPGRSLRLSCAASGFTFSSYGMHWVRQAPGKGLEWVAVIWYDGSNKYYADSVKGRFTISRDNSKNTLYLQMNSLRAEDAVYYCASNYDILTGYYGYYGMDVWGQGTTVTVSS

SEQ ID NO: 1849 - protein, 124 aa, Artificial Sequence
  Synthetic polypeptide
EVQLVQSGAEVKKPGESLRISCKGSGYSFTSYWISWVRQMPGKGLEWMGRIDPSDSYTNYSPSFQGHVTISADKSISTAYLQWSSLKASDAMYYCARHQAYCSGGSCYYYFDYWGQGTLVTVSS

SEQ ID NO: 1850 - protein, 124 aa, Artificial Sequence
  Synthetic polypeptide
QVQLVESGGGLVKPGGSLRLSCAASGFTFSDYYMSWIRQAPGKGLEWVSYISSSGSTIYYADSVKGRFTISRDNAKNSLYLQMNSLRAEDAVYYCARDSLVVAATTYYYGMDVWGQGTTVTVSS

SEQ ID NO: 1851 - protein, 125 aa, Artificial Sequence
  Synthetic polypeptide
QLQLQESGPGLVKPSETLSLTCTVSGGSISSSGYYWDWLRQPPRKGLEWIGTMYYSGSTNYNASLKSRVTISADTSKNQFSLKLSSVTAADAVYYCARAGYSSSWYGGRHWFDPWGQGTLVTVSS

SEQ ID NO: 1852 - protein, 124 aa, Artificial Sequence
  Synthetic polypeptide
EVQLVQSGAEVKKPGESLRISCKGSGYSFTSYWISWVRQMPGKGLEWMGRIDPSDSYTNYSPSFQGHVTISADKSISTAYLQWSSLKASDAMYYCARHVRYCSSTSCYDMFDYWGQGTLVTVSS

SEQ ID NO: 1853 - protein, 124 aa, Artificial Sequence
  Synthetic polypeptide
EVQLVESGGGLVQPGGSLRLSCAASGFTFSSYWMSWVRQAPGKGLEWVANIKQDGSEKYYVDSVKGRFTISRDNAKNSLYLQMNSLRAEDAVYYCARDMHSGYDQYYYYGMDVWGQGTTVTVSS

SEQ ID NO: 1854 - protein, 126 aa, Artificial Sequence
  Synthetic polypeptide
EVQLVESGGGLVKPGGSLRLSCAASGFTFSNAWMSWVRQAPGKGLEWVGRIKSKTDGGTTDYAAPVKGRFTISRDDSKNTLYLQMNSLKTEDAVYYCTTERVYDYVWGSYREFDYWGQGTLVTVSS

SEQ ID NO: 1855 - protein, 123 aa, Artificial Sequence
  Synthetic polypeptide
EVQLVESGGGLVQPGGSLRLSCAASGFTFSSYDMHWVRQATGKGLEWVSAIGTAGDTYYPGSVKGRFTISRENAKNSLYLQMNSLRAGDAVYYCARGTGYYDSSGYPYYFDYWGQGTLVTVSS

SEQ ID NO: 1856 - protein, 124 aa, Artificial Sequence
  Synthetic polypeptide
EVQLVESGGGLVQPGGSLRLSCAASGFTFSSYRMSWVRQAPGKGLEWVANIKQDGSEKYYVDFVKGRFTISRDNAKNSLYLQMNSLRAEDAVYYCARDAMVRGVNYYYFGMGVWVRGSTGTVSS

SEQ ID NO: 1857 - protein, 125 aa, Artificial Sequence
  Synthetic polypeptide
QVTLKESGPVLVKPTETLTLTCTVSGFSLSNARMGVSWIRQPPGKALEWLAHIFSNDEKSYSTSLKSRLTISKDTSKSQVVLTMTNMDPVDATYYCARILSDCSGGSCYFPFDYWGQGTLVTVSS

SEQ ID NO: 1858 - protein, 124 aa, Artificial Sequence
  Synthetic polypeptide
EVQLLESGGGLVQPGGSLRLSCAASGFTFSSYAMSWVRQAPGKGLEWVSAISGSGGSTYYADSVKGRFTISRDNSKNTLYLQMNSLRAEDAVYYCAKLGIAVAGSYYYYGMDVWGQGTTVTVSS

SEQ ID NO: 1859 - protein, 124 aa, Artificial Sequence
  Synthetic polypeptide
QVQLVESGGGLVKPGGSLRLSCAASGFTFSDYYMSWIRQAPGKGLEWVSYISSSGSTIYYADSVKGRFTISRDNAKNSLYLQMNSLRAEDAVYYCARDAVAVAGKHYYYGMDVWGQGTTVTVSS

SEQ ID NO: 1860 - protein, 124 aa, Artificial Sequence
  Synthetic polypeptide
QVQLVESGGGLVKPGGSLRLSCAASGFTFSDYYMSWIRQAPGKGLEWVSYISSSGSTIYYADSVKGRFTISRDNAKNSLYLQMNSLRAEDAVYYCARDVYCSSTSCYYYGMDVWGQGTTVTVSS

SEQ ID NO: 1861 - protein, 123 aa, Artificial Sequence
  Synthetic polypeptide
QVQLQQWGAGLLKPSETLSLTCAVYGGSFSGYYWSWIRQPPGKGLEWIGEINHSGSTNYNPSLKSRVTISVDTSKNQFSLKLSSVTAADAVYYCARGSGTIFGVVIIGWFDPWGQGTLVTVSS

SEQ ID NO: 1862 - protein, 124 aa, Artificial Sequence
  Synthetic polypeptide
QVQLVQSGAEVKKPGASVKVSCKASGYTFTSYGISWVRQAPGQGLEWMGWISAYNGNTNYAQKLQGRVTMTTDTSTSTAYMELRSLRSDDAVYYCARTASGYCSSTSCYYFDYWGQGTLVTVSS

SEQ ID NO: 1863 - protein, 125 aa, Artificial Sequence
  Synthetic polypeptide
QLQLQESGPGLVKPSETLSLTCTVSGGSISSSSYYWGWIRQPPGKGLEWIGSIYYSGSTYYNPSLKSRVTISVDTSKNQFSLKLSSVTAADAVYYCARGGYSSSWYGEKYYFDYWGQGTLVTVSS

SEQ ID NO: 1864 - protein, 124 aa, Artificial Sequence
  Synthetic polypeptide
QVQLVQSGAEVKKPGASVKVSCKASGYTFTGYYMHWVRQAPGQGLEWMGWINPNSGGTNYAQKFQGRVTMTRDTSISTAYMELSRLRSDDAVYYCARVGSSWSLGYYYYGMDVWGQGTTVTVSS

SEQ ID NO: 1865 - protein, 123 aa, Artificial Sequence
  Synthetic polypeptide
QVQLQQWGAGLLKPSETLSLTCAVYGGSFSGYYWSWIRQPPGKGLEWIGEINHSGSTNYNPSLKSRVTISVDTSKNQFSLKLSSVTAADAVYYCARGGHSSSWYQTRNWFDPWGQGTLVTVSS

SEQ ID NO: 1866 - protein, 123 aa, Artificial Sequence
  Synthetic polypeptide
QVQLQQWGAGLLKPSETLSLTCAVYGGSFSGYYWSWIRQPPGKGLEWIGEINHSGSTNYNPSLKSRVTISVDTSKNQFSLKLSSVTAADAVYYCARGEVGSSWYGVKYYFDYWGQGTLVTVSS

SEQ ID NO: 1867 - protein, 124 aa, Artificial Sequence
  Synthetic polypeptide
QVQLVQSGAEVKKPGSSVKVSCKASGGTFSSYAISWVRQAPGQGLEWMGGIIPIFGTANYAQKFQGRVTITADESTSTAYMELSSLRSADAVYFCARGGYSYGYFHYYYYMDVWGKGTTVTVSS

SEQ ID NO: 1868 - protein, 124 aa, Artificial Sequence
  Synthetic polypeptide
QVQLVQSGAEVKKPGSSVKVSCKASGGTFSSYAISWVRQAPGQGLEWMGGIIPIFGTANYAQKFQGRVTITADESTSTAYMELSSLRSEDAVYYCARTGYSSSWYKLYYGMDVWGQGTTVTVSS

SEQ ID NO: 1869 - protein, 124 aa, Artificial Sequence
  Synthetic polypeptide
EVQLVESGGGLVKPGGSLRLSCAASGFTFSSYSMNWVRQAPGKGLEWVSSISSSSSYIYYADSVKGRFTISRDNAKNSLYLQMNSLRAEDAVYYCASIAAAELRLYYYYGMDVWGQGTTVTVSS

SEQ ID NO: 1870 - protein, 123 aa, Artificial Sequence
  Synthetic polypeptide
QVQLQQWGAGLLKPSETLSLTCAVYGGSFSGYYWSWIRQPPGKGLEWIGEINHSGSTNYNPSLKSRVTISVDTSKNQFSLKVSSVTAADAVYYCARGLPVTTFVHYYYGMDVWGQGTTVTVSS

SEQ ID NO: 1871 - protein, 124 aa, Artificial Sequence
  Synthetic polypeptide
QVQLVESGGGVVQPGRSLRLSCAASGFTFSSYGMHWVRQAPGKGLEWVAVIWYDGSNKYYADSVKGRFTISRDNSKNTLYLQMNSLRAEDAVYYCARDPPTTVHNYYYYGMDVWGQGTTVTVSS

SEQ ID NO: 1872 - protein, 124 aa, Artificial Sequence
  Synthetic polypeptide
EVQLVESGGGLVKPGGSLRLSCAASGFTFSSYSMNWVRQAPGKGLEWVSSISSSSSYIYYADSVKGRFTISRDNAKNSLYLQMNSLRAEDAVYYCARDPSGYCSSTSCYVFDYWGQGTLVTVSS

SEQ ID NO: 1873 - protein, 124 aa, Artificial Sequence
  Synthetic polypeptide
EVQLVQSGAEVKKPGESLRISCKGSGYSFTSYWISWVRQMPGKGLEWMGRIDPSDSYTNYSPSFQGHVTISADKSISTAYLQWSSLKASDAMYYCARQIRYCSGGSCWDWFDPWGQGTLVTVSS

SEQ ID NO: 1874 - protein, 124 aa, Artificial Sequence
  Synthetic polypeptide
EVQLVESGGGLVQPGGSLRLSCAASGFTFSSYWMSWVRQAPGKGLEWVANIKQDGSEKYYVDSVKGRFTISRDNAKNSLYLQMNSLRAEDAVYYCARDIVVVPAAYYYYGMDVWGQGTTVTVSS

SEQ ID NO: 1875 - protein, 124 aa, Artificial Sequence
  Synthetic polypeptide
QVQLVQSGAEVKKPGSSVKVSCKASGGTFSSYAISWVRQAPGQGLEWMGGIIPILGIANYAQKFQGRVTITADKSTSTAYMELSSLRSEDAVYYCARAGWGRRDYYYYYGMDVWGQGTTVTVSS

SEQ ID NO: 1876 - protein, 124 aa, Artificial Sequence
  Synthetic polypeptide
QVQLVESGGGVVQPGRSLRLSCAASGFTFSSYGMHWVRQAPGKGLEWVAVISYDGSNKYYADSVKGRFTISRDNSKNTLYLQMNSLRAEDAVYYCAKDLTYYYDSSGWGYFDYWGQGTLVTVSS

SEQ ID NO: 1877 - protein, 124 aa, Artificial Sequence
  Synthetic polypeptide
EVQLVESGGGLVKPGGSLRLSCAASGFTFSSYSMNWVRQAPGKGLEWVSSISSSSSYIYYADSVKGRFTISRDNAKNSLYLQMNSLRAEDAVYYCARDDPPTYYYDSSGYFDYWGQGTLVTVSS

SEQ ID NO: 1878 - protein, 124 aa, Artificial Sequence
  Synthetic polypeptide
EVQLVESGGGLVQPGGSLRLSCAASGFTFSSYWMSWVRQAPGKGLEWVANIKQDGSEKYYVDSVKGRFTISRDNAKNSLYLQMNSLRAEDAVYYCARDLAVAATYYYYYGMDVWGQGTTVTVSS

SEQ ID NO: 1879 - protein, 123 aa, Artificial Sequence
  Synthetic polypeptide
QVQLQQWGAGLLKPSETLSLTCAVYGGSFSGYYWTWIRQPPGKGLEWIGEINPSGSSNYHPSLKSRVTMSVDTSKNQFSLKLSSVTAADALYYCARDFIAVAGNYYYYGMDVWGQGTTVTVSS

SEQ ID NO: 1880 - protein, 124 aa, Artificial Sequence
  Synthetic polypeptide
QVQLVESGGGVVQPGRSLRLSCAASGFTFSSYGMHWVRQAPGKGLEWVAVISYDGSNKYYADSVKGRFTISRDNSKNTLYLQMNSLRAEDAVYYCAKDGRGPYYYDSSGYFDYWGQGTLVTVSS

SEQ ID NO: 1881 - protein, 124 aa, Artificial Sequence
  Synthetic polypeptide
QVQLVQSGAEVKKPGSSVKVSCKASGGTFSSYAISWVRQAPGQGLEWMGGIIPIFGTANYAQKFQGRVTITADESTSTAYMELSSLRSEDAVYYCARGGWNYAGGDYYYYMDVWGKGTTVTVSS

SEQ ID NO: 1882 - protein, 123 aa, Artificial Sequence
  Synthetic polypeptide
QVQLQQWGAGLLKPSETLSLTCAVYGGSFSGYYWSWIRQPPGKGLEWIGEINHSGSTNYNPSLKSRVTISVDTSKNQFSLKLSSVTAADAVYYCARGTYSSSWYGPPRAFDIWGQGTMVTVSS

SEQ ID NO: 1883 - protein, 124 aa, Artificial Sequence
  Synthetic polypeptide
EVQLLESGGGLVQPGGSLRLSCAASGFTFSSYAMSWVRQAPGKGLEWVSAISGSGGSTYYADSVKGRFTISRDNSKNTLYLQMNSLRAEDAVYYCAKGALIVGATYYYYGMDVWGQGTTVTVSS

SEQ ID NO: 1884 - protein, 124 aa, Artificial Sequence
  Synthetic polypeptide
QVQLVQSGAEVKKPGSSVKVSCKASGGTFSSYAISWVRQAPGQGLEWMGGIIPIFGTANYAQKFQGRVTITADESTSTAYMELSSLRSEDAVYYCARDLWRYSGDYYYYGMDVWGQGTTVTVSS

SEQ ID NO: 1885 - protein, 124 aa, Artificial Sequence
  Synthetic polypeptide
QVQLVESGGGVVQPGRSLRLSCAASGFTFSSYGMHWVRQAPGKGLEWVAVISYDGSNKYYADSVKGRFTISRDNSKNTLYLQMNSLRAEDAVYYCAKDKDVLLWFGSSGGFDYWGQGTLVTVSS

SEQ ID NO: 1886 - protein, 124 aa, Artificial Sequence
  Synthetic polypeptide
EVQLLESGGGLVQPGGSLRLSCAASGFTFSSYAMSWVRQAPGKGLEWVSAISGSGGSTYYADSVKGRFTISRDNSKNTLYLQMNSLRAEDAVYYCAKDYGGNEGDYYYYGMDVWGQGTTVTVSS

SEQ ID NO: 1887 - protein, 125 aa, Artificial Sequence
  Synthetic polypeptide
QVQLVQSGAEVKKPGASVKVSCKVSGYTLTELSMHWVRQAPGKGLEWMGGFDPEDGETIYAQKFQGRVTMTEDTSTDTAYMELSSLRSEDAVYYCATAPAYCSSTSCRLNWFDPWGQGTLVTVSS

SEQ ID NO: 1888 - protein, 127 aa, Artificial Sequence
  Synthetic polypeptide
EVQLVESGGGLVKPGGSLRLSCAASGFTFSNAWMSWVRQAPGKGLEWVGRIKSKTDGGTTDYAAPVKGRFTISRDDSKNTLYLQMNSLKTEDAVYYCTTGTWYYDSSGYSNDAFDIWGQGTMVTVSS

SEQ ID NO: 1889 - protein, 126 aa, Artificial Sequence
  Synthetic polypeptide
QLQLQESGPGLVKPSETLSLTCTVSGGSISSSSYYWGWIRQPPGKGLEWIGSIYYSGSTYYNPSLKSRVTISVDTSKNQFSLKLSSVTAADAVYYCARHPLYCSSTSCYEFWFDPWGQGTLVTVSS

SEQ ID NO: 1890 - protein, 124 aa, Artificial Sequence
  Synthetic polypeptide
QVQLQESGPGLVKPSETLSLTCTVSGGSIRSYSWSWIRQPPGKELEWIGYIYYSGSTNYNPSLKSRVTISVDTSKNQFSLKLNSVTAADAVYYCAREGYYDSSGYYNHDAFDIWGQGTMVTVSS

SEQ ID NO: 1891 - protein, 124 aa, Artificial Sequence
  Synthetic polypeptide
QVQLQQWGAGLLKPSETLSLTCAVYGGSFSGYYWSWIRQPPGKGLEWIGEINHSGSTNYNPSLKSRVTISVDTSKNQFSLKLSSVTAADAVYYCARGGASSSWLYYYYYGMDVWGQGTTVTVSS

SEQ ID NO: 1892 - protein, 124 aa, Artificial Sequence
  Synthetic polypeptide
QVQLQESGPGLVKPSETLSLTCTVSGGSISSYYWSWIRQPPGKGLEWIGYIYYSGSTNYNPSLKSRVTISVDTSKNQFSLKLSSVTAADAVYYCARALYYYDSSGYGINWFDPWGQGTLVTVSS

SEQ ID NO: 1893 - protein, 124 aa, Artificial Sequence
  Synthetic polypeptide
QVQLQQWGAGLLKPSETLSLTCAVYGGSFSGYYWSWIRQPPGKGLEWIGEINHSGSTNYNPSLKSRVTISVDTSKNQFSLKLSSVTAADAVYYCARGPRYSSSWYGDRNWFDPWGQGTLVTVSS

SEQ ID NO: 1894 - protein, 125 aa, Artificial Sequence
  Synthetic polypeptide
QVQLVQSGAEVKKPGASVKVSCKVSGYTLTELSMHWVRQAPGKGLEWMGGFDPEDGETIYAQKFQGRVTMTEDTSTDTAYMELSSLRSEDAVYYCATGPPYCSGGSCYSNWFDPWGQGTLVTVSS

SEQ ID NO: 1895 - protein, 126 aa, Artificial Sequence
  Synthetic polypeptide
QLQLQESGPGLVKPSETLSLTCTVSGGSISSSSYYWGWIRQPPGKGLEWIGSIYYSGSTYYNPSLKSRVTISVDTSKNQFSLKLSSVTAADAVYYCARHPLYCSSTSCYEYYFDYWGQGTLVTVSS

SEQ ID NO: 1896 - protein, 124 aa, Artificial Sequence
  Synthetic polypeptide
QVQLQESGPGLVKPSETLSLTCTVSGGSISSYYWSWIRQPPGKGLEWIGYIYYSRSTNYNPSLKSRVTISVDTSKNQFSLKLSSVTAADAVYYCAREGLGYCSGGSCARAFDIWGQGTMVTVSS

SEQ ID NO: 1897 - protein, 124 aa, Artificial Sequence
  Synthetic polypeptide
QVQLQESGPGLVKPSETLSLTCTVSGGSISSYYWSWIRQPPGKGLEWIGSIYYSGSTNYNPSLKSRVTISVDTSKNQFSLKMSSVTAADAVYYCARDRSIVVAGYYYYYGMDVWGQGSTVTVSS

SEQ ID NO: 1898 - protein, 125 aa, Artificial Sequence
  Synthetic polypeptide
QVQLVQSGAEVKKPGASVKVSCKASGYTFTSYGISWVRQAPGQGLEWMGWISAYNGNTNYAQKLQGRVTMTTDTSTSTAYMELRSLRSDDAVYYCARGIVVVPAAHYYYYGMDVWGQGTTVTVSS

SEQ ID NO: 1899 - protein, 126 aa, Artificial Sequence
  Synthetic polypeptide
QVTLKESGPVLVKPTETLTLTCTVSGFSLSNARMGVSWIRQPPGKALEWLAHIFSNDEKSYSTSLKSRLTISKDTSKSQVVLTMTNMDPVDATYYCARLQREVTIFGVVISPIDYWGQGTLVTVSS

SEQ ID NO: 1900 - protein, 125 aa, Artificial Sequence
  Synthetic polypeptide
EVQLLESGGGLVQPGGSLRLSCAASGFTFSSYAMSWVRQAPGKGLEWVSAISGSGGSTYYADSVKGRFTISRDNSKNTLYLQMNSLRAEDAVYYCAKDYYGSGTGDYYYYGMDVWGQGTTVTVSS

SEQ ID NO: 1901 - protein, 125 aa, Artificial Sequence
  Synthetic polypeptide
QVQLVQSGAEVKKPGSSVKVSCKASGGTFSSYAISWVRQAPGQGLEWMGGIIPIFGTANYAQKFQGRVTITADESTSTAYMELSSLRSEDAVYYCARGGWGSGRPYYYYYYMDVWGKGTTVTVSS

SEQ ID NO: 1902 - protein, 124 aa, Artificial Sequence
  Synthetic polypeptide
QVQLQESGPGLVKPSETLSLTCTVSGGSISSYYWSWIRQPAGKGLEWIGRIYTSGSTNYNPSLKSRVTMSVDTSKNQFSLKLSSVTAADAVYYCARVALGYCSSTSCQNAFDIWGQGTMVTVSS

SEQ ID NO: 1903 - protein, 127 aa, Artificial Sequence
  Synthetic polypeptide
EVQLVESGGGLVKPGGSLRLSCAASGFTFSNAWMSWVRQAPGKGLEWVGRIKSKTDGGTTDYAAPVKGRFTISRDDSKNTLYLQMNSLKTEDAVYYCTTVLHYYDSSGYSNDAFDIWGQGTMVTVSS

SEQ ID NO: 1904 - protein, 125 aa, Artificial Sequence
  Synthetic polypeptide
QVQLVQSGAEVKKPGASVKVSCKASGYTFTGYYMHWVRQAPGQGLEWMGWINPNSGGTNYAQKFQGRVTMTRDTSISTAYMELSRLRSDDAVYYCARGIVVVPAASYYYYGMDVWGQGTTVTVSS

SEQ ID NO: 1905 - protein, 125 aa, Artificial Sequence
  Synthetic polypeptide
QVQLVESGGGVVQPGRSLRLSCAASGFTFSSYGMHWVRQAPGKGLEWVAVISYDGSNKYYADSVKGRFTISRDNSKNTLYLQMNSLRAEDAVYYCAKRPGAYCGGDCYSGYFDYWGQGTLVTVSS

SEQ ID NO: 1906 - protein, 125 aa, Artificial Sequence
  Synthetic polypeptide
QVQLVQSGAEVKKPGSSVKVSCKASGGTFSSYAISWVRQAPGQGLEWMGGIIPIFGTANYAQKFQGRVTITADESTSTAYMELSSLRSEDAVYYCARGGYSYANRYYYYYYMDVWGKGTTVTVSS

SEQ ID NO: 1907 - protein, 126 aa, Artificial Sequence
  Synthetic polypeptide
QVQLQESGPGLVKPSQTLSLTCTVSGGSISSGGYYWSWIRQHPGKGLEWIGYIYYSGSTYYNPSLKSRVTISVDTSKNQFSLKLSSVTAADAVYYCARVRVYCSSTSCYEVWFDPWGQGTLVTVSS

SEQ ID NO: 1908 - protein, 125 aa, Artificial Sequence
  Synthetic polypeptide
EVQLVESGGGLVQPGGSLRLSCAASGFTFSNYWMHWVRQAPGKGLVWVSRINSDGTSTSYADSVKGRFTISRDNAKNTLYLQMNSLRAEDAVYYCARGPPDIVVVPAARNWFDPWGQGTLVTVSS

SEQ ID NO: 1909 - protein, 125 aa, Artificial Sequence
  Synthetic polypeptide
QVQLVQSGAEVKKPGASVKVSCKVSGYTLTELSMHWVRQAPGKGLEWMGGFDPEDGETIYAQKFQGRVTMTEDTSTDTAYMELSSLRSEDAVYYCATAPPYYYGSGSYYNWFDPWGQGTLVTVSS

SEQ ID NO: 1910 - protein, 125 aa, Artificial Sequence
  Synthetic polypeptide
QVQLVQSGAEVKKPGSSVKVSCKASEGTFNSYAISWVRQAPGQGLEWMGGIIPIFGTANYAQKFQGRVTITADESTSTAYMELSSLRSEDAVYYCARGGGNMVRGVIMYNWFDPWGQGTLVTVSS

SEQ ID NO: 1911 - protein, 125 aa, Artificial Sequence
  Synthetic polypeptide
EVQLVQSGAEVKKPGESLKISCKGSGYSFTSYWIGWVRQMPGKGLEWMGIIYPGDSDTRYSPSFQGQVTISADKSISTAYLQWSSLKASDAMYYCARSGYYDSSGYYYVGDFDYWGQGTLVTVSS

SEQ ID NO: 1912 - protein, 125 aa, Artificial Sequence
  Synthetic polypeptide
QVQLVQSGAEVKKPGASVKVSCKASGYTFTSYGISWVRQAPGQGLEWMGWISAYNGNTNYAQKLQGRVTMTTDTSTSTAYMELRSLRSDDAVYYCARDRVIAAAGGYYYYGMDVWGQGTTVTVSS

SEQ ID NO: 1913 - protein, 125 aa, Artificial Sequence
  Synthetic polypeptide
QVQLVQSGAEVKKPGASVKVSCKASGYTFTSYGISWVRQAPGQGLEWMGWISAYNGNTNYAQKLQGRVTMTTDTSTSTAYMELRSLRSDDAVYYCARDLGYCSSTSCYGDWFDPWGQGTLVTVSS

SEQ ID NO: 1914 - protein, 125 aa, Artificial Sequence
  Synthetic polypeptide
QVQLVESGGGLVKPGGSLRLSCAASGFTFSDYYMSWIRQAPGKGLEWVSYISSSGSTIYYADSVKGRFTISRDNAKNSLYLQMNSLRAEDAVYYCARDARIAAAGTTYYYGMDVWGQGTTVTVSS

SEQ ID NO: 1915 - protein, 125 aa, Artificial Sequence
  Synthetic polypeptide
EVQLLESGGGLVQPGGSLRLSCAASGFTFSSYAMSWVRQAPGKGLEWVSAISGSGGSTYYADSVKGRFTISRDNSKNTLYLQMNSLRAEDAVYYCAKDYYDSSGRGFYYYGMDVWGQGTTVTVSS

SEQ ID NO: 1916 - protein, 125 aa, Artificial Sequence
  Synthetic polypeptide
EVQLVESGGGLVQPGGSLRLSCAASGFTFSSYWMSWVRQAPGKGLEWVANIKQDGSEKYYVDSVKGRFTISRDNAKNSLYLQMNSLRAEDAVYYCARDQGAAAADYYYYYGMDVWGQGTTVTVSS

SEQ ID NO: 1917 - protein, 125 aa, Artificial Sequence
  Synthetic polypeptide
EVQLLESGGGLVQPGGSLRLSCAASGFTFSSYAMSWVRQAPGKGLEWVSAISGSGGSTYYADSVKGRFTISRDNSKNTLYLQMNSLRAEDAVYYCAKGSYCSGGSCIYYYGMDVWGQGTTVTVSS

SEQ ID NO: 1918 - protein, 125 aa, Artificial Sequence
  Synthetic polypeptide
EVQLVQSGAEVKKPGESLKISCKGSGYSFTSYWIGWVRQMPGKGLEWMGIIYPGDSDTRYSPSFQGQVTISADKSISTAYLQWSSLKASDAMYYCARGGLYCSSTSCYVNWFDPWGQGTLVTVSS

SEQ ID NO: 1919 - protein, 125 aa, Artificial Sequence
  Synthetic polypeptide
QVQLVESGGGVVQPGRSLRLSCAASGFTFSSYGMHWVRQAPGKGLEWVALISYAGSNKYYADSVKGRFTISRDNSRNTLYLQMNSLRAEDALYYCAKDVYGSGSYYYYYYGMDVWGQGTTVTVSS

SEQ ID NO: 1920 - protein, 126 aa, Artificial Sequence
  Synthetic polypeptide
QLQLQESGPGLVKPSETLSLTCTVSGGSISSSSYYWGWIRQPPGKGLEWIGSIYYSGSTNYNPSLKSRVTISVDTSKNQFSLKLSSVTVADAVYYCARRALGYCSSTSCQEAFDIWGQGTMVTVSS

SEQ ID NO: 1921 - protein, 125 aa, Artificial Sequence
  Synthetic polypeptide
EVQLVESGGGLVQPGGSLRLSCAASGFTFSSYWMSWVRQAPGKGLEWVANIKQDGSEKYYVDSVKGRFTISRDNAKNSLYLQMNSLRAEDAVYYCARDTTVTTSGNYYYYGMDVWGQGTTVTVSS

SEQ ID NO: 1922 - protein, 124 aa, Artificial Sequence
  Synthetic polypeptide
QVQLQQWGAGLLKPSETLSLTCAVYGGSFSGYYWSWIRQPPGKGLEWIGEINHSGSTNYNPSLKSRVTISVDTSKNQFSLKLSSVTAADAVYYCARWRYSSSWYTPPKYYFDYWGQGTLVTVSS

SEQ ID NO: 1923 - protein, 125 aa, Artificial Sequence
  Synthetic polypeptide
QVQLVQSGAEVKKPGSSVKVSCKASGGTFSSYAISWVRQAPGQGLEWMGGIIPIFGTANYAQKFQGRVTITADESTSTAYMELSSLRSEDAVYYCARGIGGYSYGYFYYYGMDVWGQGTTVTVSS

SEQ ID NO: 1924 - protein, 126 aa, Artificial Sequence
  Synthetic polypeptide
QLQLQESGPGLVKPSETLSLTCTVSGGSISSSSYYWGWIRQPPGKGLEWIGSIYYSGSTYYNPSLKSRVTISVDTSKNQFSLKLSSVTAADAVYYCARIPVLRYFDWLLLGWFDPWGQGTLVTVSS

SEQ ID NO: 1925 - protein, 125 aa, Artificial Sequence
  Synthetic polypeptide
EVQLVESGGGLVQPGGSLRLSCAASGFTFSSYWMSWVRQAPGKGLEWVANIKQDGSEKYYVDSVKGRFTISRDNAKNSLYLQMNSLRAEDAVYYCARDLGTTGTHYYYYYGMDVWGQGTTVTVSS

SEQ ID NO: 1926 - protein, 124 aa, Artificial Sequence
  Synthetic polypeptide
QVQLQESGPGLVKPSETLSLTCTVSGGSISSYYWSWIRQPPGKGLEWIGYIYYSGSTNYNPSLKSRVTISVDTSKNQFSLKLSSVTAADAVYYCAREGLYCSGGSCYYYGMDVWGQGTTVTVSS

SEQ ID NO: 1927 - protein, 125 aa, Artificial Sequence
  Synthetic polypeptide
QVQLVESGGGLVKPGGSLRLSCAASGFTFSDYYMSWIRQAPGKGLEWVSYISSSGSTIYYADSVKGRFTISRDNAKNSLYLQMNSLRAEDAVYYCARDLVAAAGSNYYYYGMDVWGQGTTVTVSS

SEQ ID NO: 1928 - protein, 124 aa, Artificial Sequence
  Synthetic polypeptide
QVQLQQWGAGLLKPSETLSLTCAVYGGSFSGYYWSWIRQPPGKGLEWIGEINHSGSTNYNPSLKSRVTISVDTSKNQFSLKLSSVTAADAVYYCARGGRYSSSWYGERYYFDYWGQGTLVTVSS

SEQ ID NO: 1929 - protein, 125 aa, Artificial Sequence
  Synthetic polypeptide
QVQLVQSGAEVKKPGSSVKVSCKASGGTFSSYAISWVRQAPGQGLEWMGGIIPIFGTANYAQKFQGRVTITADESTSTAYMELSSLRSEDAVYYCARGGWSAADRYYYYYYMDVWGKGTTVTVSS

SEQ ID NO: 1930 - protein, 125 aa, Artificial Sequence
  Synthetic polypeptide
QVQLVQSGAEVKKPGSSVKVSCKASGGTFSSYAISWVRQAPGQGLEWMGGIIPIFGTANYAQKFQGRVTITADESTSTAYMELSSLRSEDAVYYCARGGWTTVTPLYYYYGMDVWGQGTTVTVSS

SEQ ID NO: 1931 - protein, 126 aa, Artificial Sequence
  Synthetic polypeptide
EVQLVESGGGLVQPGGSLRLSCAASGFTFTTYWMTWVRQAPGKGLEWVANINQDGSEKYYVDSVKGRFTISRDNAKDSLYLEMNSLSAEDAVYYCARDGTYYYDSSGYYSDAFDIWGQGTMVTVSS

SEQ ID NO: 1932 - protein, 127 aa, Artificial Sequence
  Synthetic polypeptide
QLQLQESGPGLVKPSETLSLTCTVSGGSISSSSYYWGWIRQPPGKGLEWIGSIYYSGSTYYNPSLKSRVTISVDTSKNQFSLKLSSVTAADAVYYCAREGGLRYFDLDYYYYGMDVWGQGTTVTVSS

SEQ ID NO: 1933 - protein, 125 aa, Artificial Sequence
  Synthetic polypeptide
QVQLQQWGAGLLKPSETLSLTCAVYGGSFSGYYWSWIRQPPGKGLEWIGEINHSGSTNYNPSLKSRVTISVDTSKNQFSLKLSSVTAADAVYYCARGVIAVAGLIEYYYYGMDVWGQGTTVTVSS

SEQ ID NO: 1934 - protein, 126 aa, Artificial Sequence
  Synthetic polypeptide
QVQLVQSGAEVKKPGASVKVSCKASGYTFTGYYMHWVRQAPGQGLEWMGWINPNSGGTNYAQKFQGRVTMTRDTSISTAYMELSRLRSDDAVYYCARGGVHYYDSSGYYNDAFDIWGQGTMVTVSS

SEQ ID NO: 1935 - protein, 126 aa, Artificial Sequence
  Synthetic polypeptide
QVQLVESGGGVVQPGRSLRLSCAASGFTFSSYGMHWVRQAPGKGLEWVAVISYDGSNKYYADSVKGRFTISRDNSKNTLYLQMNSLRAEDAVYYCAKVQGPYCSGGSCYSGAFDYWGQGTLVTVSS

SEQ ID NO: 1936 - protein, 127 aa, Artificial Sequence
  Synthetic polypeptide
QVQLQESGPGLVKPSQTLSLTCTVSGGSISSGGYYWSWIRQHPGKGLEWIGYIYYSGSTYYNPSLKSRVTISVDTSKNQFSLKLSSVTAADAVYYCARGGEVRYFDWSYYYYGMDVWGQGTTVTVSS

SEQ ID NO: 1937 - protein, 127 aa, Artificial Sequence
  Synthetic polypeptide
QLQLQESGPGLVKPSETLSLTCTVSGGSISSSSYYWGWIRQPPGKGLEWIGSIYYSGSTYYNPSLKSRVTISVDTSKNQFSLKLSSVTAADAVYYCARMNVLRYFDWLSHYYGMDVWGQGTTVTVSS

SEQ ID NO: 1938 - protein, 126 aa, Artificial Sequence
  Synthetic polypeptide
EVQLVESGGGLVKPGGSLRLSCAASGFTFSSYSMNWVRQAPGKGLEWVSSISSSSSYIYYADSVKGRFTISRDNAKNSLYLQMNSLRAEDAVYYCARDGRVLEWLLNYYYYYMDVWGKGTTVTVSS

SEQ ID NO: 1939 - protein, 126 aa, Artificial Sequence
  Synthetic polypeptide
EVQLLESGGGLVQPGGSLRLSCAASGFSFSTYAMSWVRQAPGKGLEWVSTIPNSGDKTYYADSVEGRFTISRDNSKNTLYLQMNSLRVEDAVYYCAKDGLHYYDSSGYYTDAFDLWGQGTTVTVSS

SEQ ID NO: 1940 - protein, 125 aa, Artificial Sequence
  Synthetic polypeptide
EVQLVESGGGLVQPGGSLRLSCAASGFTFSSYDMHWVRQATGKGLEWVSAIGTAGDPYYPGSVKGRFTISRENAKNSLYLQMNSLRAGDAVYYCARGTMVRGVITYYYYYYMDVWGKGTTVTVSS

SEQ ID NO: 1941 - protein, 127 aa, Artificial Sequence
  Synthetic polypeptide
QVQLQESGPGLVKPSETLSLTCTVSGGSVSSGSYYWSWIRQPPGKGLEWIGYIYYSGSTNYNPSLKSRVTISVDTSKNQFSLKLSSVTAADAVYYCARETYYYDSSGYYQSNAFDIWGQGTMVTVSS

SEQ ID NO: 1942 - protein, 128 aa, Artificial Sequence
  Synthetic polypeptide
EVQLVESGGGLVKPGGSLRLSCAASGFTFSNAWMSWVRQAPGKGLEWVGRIKSKTDGGTTDYAAPVKGRFTISRDDSKNTLYLQMNSLKTEDAVYYCTTDLSGVYYDILTGYYRIDYWGQGTLVTVSS

SEQ ID NO: 1943 - protein, 127 aa, Artificial Sequence
  Synthetic polypeptide
QVTLRESGPALVKPTQTLTLTCTFSGFSLSTSGMCVSWIRQPPGKALEWLALIDWDDDKYYSTSLKTRLTISKDTSKNQVVLTMTNMDPVDATYYCARLVVDTAMVGEYYYYGMDVWGQGTTVTVSS

SEQ ID NO: 1944 - protein, 125 aa, Artificial Sequence
  Synthetic polypeptide
QVQLQQWGAGLLKPSETLSLTCAVYGGSFSGYYWSWIRQPPGKGLEWIGEINHSGSTNYNPSLKSRVTISVDTSKNQFSLKLSSVTAADAVYYCARAGVLRYFDYYYYYYGMDVWGQGTTVTVSS

SEQ ID NO: 1945 - protein, 126 aa, Artificial Sequence
  Synthetic polypeptide
QVQLVESGGGLVKPGGSLRLSCAASGFTFSDYYMSWIRQAPGKGLEWVSYISSSGSTIYYADSVKGRFTISRDNAKNSLYLQMNSLRAEDAVYYCARDIVVVPAATYYYYYGMDVWGQGTTVTVSS

SEQ ID NO: 1946 - protein, 125 aa, Artificial Sequence
  Synthetic polypeptide
QVQLQESGPGLVKPSETLSLTCTVSGGSISSYYWSWIRQPPGKGLEWIGYIYYSGSTNYNPSLKSRVTISVDTSKNQFSLKLSSVTAADAVYYCARDSVLRYFDWSYYYYGMDVWGQGTTVTVSS

SEQ ID NO: 1947 - protein, 126 aa, Artificial Sequence
  Synthetic polypeptide
QVQLVESGGGVVQPGRSLRLSCAASGFTFSSYGMHWVRQAPGKGLEWVAVIWYDGSNKYYADSVKGRFTISRDNSKNTLYLQMNSLRAEDAVYYCAKGGGLYCSGGSCYSNYFDYWGQGTLVTVSS

SEQ ID NO: 1948 - protein, 126 aa, Artificial Sequence
  Synthetic polypeptide
QVQLVQSGAEVKKPGASVKVSCKVSGYTLTELSMHWVRQAPGKGLEWMGGFDPEDGETIYAQKFQGRVTMTEDTSTDTAYMELSSLRSEDAVYYCATAPAVAGTPGNYYYYGMDVWGQGTTVTVSS

SEQ ID NO: 1949 - protein, 126 aa, Artificial Sequence
  Synthetic polypeptide
QVQLVESGGGLVKPGGSLRLSCAASGFTFSDYYMSWIRQAPGKGLEWVSYISSSGSTIYYADSVKGRFTISRDNAKNSLYLQMNSLRAEDAVYYCARDRYTYYYDSSGYYNWFDPWGQGTLVTVSS

SEQ ID NO: 1950 - protein, 125 aa, Artificial Sequence
  Synthetic polypeptide
EVQLVESGGGLVQPGGSLRLSCAASGFTFSSYDMHWVRQATGKGLEWVSAIGTAGDTYYPGSVKGRFTISRENAKNSLYLQMNSLRAGDAVYYCARVGYYYDSSGYPSYWYFDLWGRGTLVTVSS

SEQ ID NO: 1951 - protein, 125 aa, Artificial Sequence
  Synthetic polypeptide
QVQLQQWGAGLLKPSETLSLTCAVYGGSFSGYYWSWIRQPPGKGLEWIGEINHSGSTNYNPSLKSRVTISVDTSKNQFSLKLSSVTAADAVYYCARGLVGSSSWYDYYYYGMDVWGQGTTVTVSS

SEQ ID NO: 1952 - protein, 126 aa, Artificial Sequence
  Synthetic polypeptide
QVQLVQSGAEVKKPGASVKVSCKASGYTFTSYGISWVRQAPGQGLEWMGWISAYNGNTNYAQKLQGRVTMTTDTSTSTAYMELRSLRSDDAVYYCARAIVVVPAAHVYYYYGMDVWGQGTTVTVSS

SEQ ID NO: 1953 - protein, 126 aa, Artificial Sequence
  Synthetic polypeptide
QVQLVESGGGVVQPGRSLRLSCAASGFTFSSYGIHWVRQAPGKGLEWVAVISYDGSNKYYADSVKGRFTISRDNSKNTLYLQMNSLRAEDAVYYCAKVRYCSSTSCYGYYYGIDVWGQGTTVTVSS

SEQ ID NO: 1954 - protein, 125 aa, Artificial Sequence
  Synthetic polypeptide
QVQLQQWGAGLLKPSETLSLTCAVYGGSFSGYYWSWIRQPPGKGLEWIGEINHSGSTNYNPSLKSRVTISVDTSKNQFSLKLSSVTAADAVYYCARGFPSSSWYHGYYYYGMDVWGQGTTVTVSS

SEQ ID NO: 1955 - protein, 126 aa, Artificial Sequence
  Synthetic polypeptide
EVQLVESGGGLVQPGGSLRLSCAASGFTFSSYWMSWVRQAPGKGLEWVANIKQDGSEKYYVDSVKGRFTISRDNAKNSLYLQMNSLRAEDAVYYCARDAWAAAGTQYYYYYGMDVWGQGTTVTVSS

SEQ ID NO: 1956 - protein, 127 aa, Artificial Sequence
  Synthetic polypeptide
QLQLQESGPGLVKPSETLSLTCTVSGGSISSSSYYWGWIRQPPGKGLEWIGSIYYSGSTYYNPSLKSRVTISVDTSKNQFSLKLSSVTAADAVYYCASSHVLRYFDWLLSGGWFDPWGQGTLVTVSS

SEQ ID NO: 1957 - protein, 126 aa, Artificial Sequence
  Synthetic polypeptide
QVQLVQSGAEVKKPGASVKVSCKASGYTFTSYGISWVRQAPGQGLEWMGWISAYNGNTNYAQKLQGRVTMTTDTSTSTAYMELRSLRSDDAVYYCARDRGYDYVWGSYRPYYFDYWGQGTLVTVSS

SEQ ID NO: 1958 - protein, 126 aa, Artificial Sequence
  Synthetic polypeptide
EVQLVESGGGLVQPGGSLRLSCAASGLTFSSYWMHWVRQVPGKGLVWVSRINSDGSSTSYADSVKGRFTISRDNAKNTLYLQMNSLGAEDAVYYCARAGLFYYDSSGYYNDAFDIWGQGTMVTVSS

SEQ ID NO: 1959 - protein, 125 aa, Artificial Sequence
  Synthetic polypeptide
QVQLQESGPGLVKPSETLSLTCTVSGGSISSYYWSWIRQPPGKGLEWIGYIYYSGSTNYNPSLKSRVTISVDTSKNQFSLKLSSVTAADAVYYCARGLVGAYCGGDCYDNWFDPWGQGTLVTVSS

SEQ ID NO: 1960 - protein, 127 aa, Artificial Sequence
  Synthetic polypeptide
QLQLQESGPGLVKPSETLSLTCTVSGGSISSSSYYWGWIRQPPGKGLEWIGSIYYSGSTYYNPSLKSRVTISVDTSKNQFSLKLSSVTAADAVYYCARLGILRYFDWLSNYYGMDVWGQGTTVTVSS

SEQ ID NO: 1961 - protein, 126 aa, Artificial Sequence
  Synthetic polypeptide
QVQLVESGGGVVQPGRSLRLSCAASGFTFSSYGMHWVRQAPGKGLEWVAVISYDGSNKYYADSVKGRFTISRDNSKNTLYLQMNSLRAEDAVYYCAKVRGRYCSGGSCYSGQFDYWGQGTLVTVSS

SEQ ID NO: 1962 - protein, 126 aa, Artificial Sequence
  Synthetic polypeptide
QVQLVQSGAEVKKPGASVKVSCKASGYTFTSYGISWVRQAPGQGLEWMGWISAYNGNTNYAQKLQGRVTMTTDTSTSTAYMELRSLRSDDAVYYCARDRRIAAAGTSYYYYGMDVWGQGTTVTVSS

SEQ ID NO: 1963 - protein, 126 aa, Artificial Sequence
  Synthetic polypeptide
QVQLVESGGGLVKPGGSLRLSCAASGFTFSDYYMSWIRQAPGKGLEWVSYISSSGSTIYYADSVKGRFTISRDNAKNSLYLQMNSLRAEDAVYYCARDQELRYFDWLYYYYGMDVWGQGTTVTVSS

SEQ ID NO: 1964 - protein, 126 aa, Artificial Sequence
  Synthetic polypeptide
EVQLVESGGGLVQPGGSLRLSCAASGFTFSSYWMSWVRQAPGKGLEWVANIKQDGSEKYYVDSVKGRFTISRDNAKNSLYLQMNSLRAEDAVYYCARGSPCGGDCSIYYYYGMDVWGQGTTVTVSS

SEQ ID NO: 1965 - protein, 126 aa, Artificial Sequence
  Synthetic polypeptide
EVQLVESGGGLVQPGGSLRLSCAASGFTFSSYWMSWVRQAPGKGLEWVANIKQDGSEKYYVDSVKGRFTISRDNAKNSLYLQMNSLRAEDAVYYCARDLADDILTGYYYYYGMDVWGQGTTVTVSS

SEQ ID NO: 1966 - protein, 126 aa, Artificial Sequence
  Synthetic polypeptide
QVQLVQSGAEVKKPGASVKVSCKASGYTFTSYGISWVRQAPGQGLEWMGWISAYNGNTNYAQKLQGRVTMTTDTSTSTAYMELRSLRSDDAVYYCARELVLRYFDWTYYYYGMDVWGQGTTVTVSS

SEQ ID NO: 1967 - protein, 127 aa, Artificial Sequence
  Synthetic polypeptide
QVQLVQSGAEVKKPGASVKVSCKASGYTFTSYGISWVRQAPGQGLEWMGWISAYNGNTNYAQKLQGRVTMTTDTSTSTAYMELRSLRSDDAVYYCARGIVVVVAATPGYYYYGMDVWGQGTTVTVSS

SEQ ID NO: 1968 - protein, 127 aa, Artificial Sequence
  Synthetic polypeptide
QVQLVQSGAEVKKPGASVKVSCKVSGYTLTELSMHWVRQAPGKGLEWMGGFDPEDGETIYAQKFQGRVTMTEDTSTDTAYMELSSLRSEDAVYYCATGFVVRGVITQYYYYYGMDVWGQGTTVTVSS

SEQ ID NO: 1969 - protein, 126 aa, Artificial Sequence
  Synthetic polypeptide
QVQLQQWGAGLLKPSETLSLTCAVYGGSFSGYYWSWIRQPPGKGLEWIGEINHSGSTNYNPSLKSRVTISVDTSKNQFSLKLSSVTAADAVYYCARGRIWFGEFLGNYYYYGMDVWGQGTTVTVSS

SEQ ID NO: 1970 - protein, 127 aa, Artificial Sequence
  Synthetic polypeptide
QVQLVQSGAEVKKPGASVKVSCKASGYTFTSYGISWVRQAPGQGLEWMGWISAYNGNTNYAQKLQGRVTMTTDTSTSTAYMELRSLRSDDAVYYCARAIVVVPAANTNYYYYGMDVWGQGTTVTVSS

SEQ ID NO: 1971 - protein, 127 aa, Artificial Sequence
  Synthetic polypeptide
QVQLVQSGAEVKKPGSSVKVSCKASGGTFSSYAISWVRQAPGQGLEWMGGIIPIFGTANYAQKFQGRVTITADESTSTAYMELSSLRSEDAVYYCARAEYSSSWYLGDYYYYGMDVWGQGTTVTVSS

SEQ ID NO: 1972 - protein, 127 aa, Artificial Sequence
  Synthetic polypeptide
EVQLVESGGGLVQPGGSLRLSCAASGFTFSSYWMSWVRQAPGKGLEWVANIKQDGSEKYYVDSVKGRFTISRDNAKNSLYLQMNSLRAEDAVYYCARDMYCSSTSCSAVYYYGMDVWGQGTTVTVSS

SEQ ID NO: 1973 - protein, 127 aa, Artificial Sequence
  Synthetic polypeptide
QVQLVQSGAEVKKPGSSVKVSCKASGGTFSSYAISWVRQAPGQGLEWMGGIIPIFGTANYAQKFQGRVTITADESTSTAYMELSSLRSEDAVYYCARGFYCSGGSCRIYYYYGMDVWGQGTTVTVSS

SEQ ID NO: 1974 - protein, 127 aa, Artificial Sequence
  Synthetic polypeptide
QVQLVESGGGVVQPGRSLRLSCAASGCTFSSYGMHWVRQAPGKGLEWVAVISYDGSNKYYADSVKRRFTISRDNSKNTLYLQMNSLRAEDAVYYCAKEGGGGYCSGGSCYSSYFDYWGQGTLVTVSS

SEQ ID NO: 1975 - protein, 127 aa, Artificial Sequence
  Synthetic polypeptide
EVQLVESGGGLVKPGGSLRLSCAASGFTFSSYSMNWVRQAPGKGLEWVSSISSSSSYIYYADSVKGRFTISRDNAKNSLYLQMNSLRAEDAVYYCARAGATYYYDSSGYYPDAFDIWGQGTMVTVSS

SEQ ID NO: 1976 - protein, 127 aa, Artificial Sequence
  Synthetic polypeptide
QVQLVESGGGVVQPGRSLRLSCAASGFTFSSYGMHWVRQAPGKGLEWVAVIWYDGSNKYYADSVKGRFTISRDNSKNTLYLQMNSLRAEDAVYYCARGGYCSGGSCYSYYYYGMDVWGQGTTVTVSS

SEQ ID NO: 1977 - protein, 127 aa, Artificial Sequence
  Synthetic polypeptide
EVQLVESGGGLVQPGGSLRLSCAASGFTFSSYWMSWVRQAPGKGLEWVANIKQDGSEKYYVDSVKGRFTISRDNAKNSLYLQMNSLRAEDAVYYCARDGDCSGGSCYSSYYYGMDVWGQGTTVTVSS

SEQ ID NO: 1978 - protein, 128 aa, Artificial Sequence
  Synthetic polypeptide
QVQLVQSGAEVKKPGASVKVSCKASGYTFTSYGISWVRQAPGQGLEWMGWISAYNGNTNYAQKLQGRVTMTTDTSTSTAYMELRSLRSDDAVYYCARGIVVVPAAMQLYYYYYGMDVWGQGTTVTVSS

SEQ ID NO: 1979 - protein, 128 aa, Artificial Sequence
  Synthetic polypeptide
EVQLVESGGGLVQPGGSLRLSCAASGFTFSSYWMSWVRQAPGKGLEWVANIKQDGSEKYYVDSVKGRFTISRDNAKNSLYLQMNSLRAEDAVYYCARDHKTYYYDSSGYYYEYYFDYWGQGTLVTVSS

SEQ ID NO: 1980 - protein, 128 aa, Artificial Sequence
  Synthetic polypeptide
QVQLVQSGAEVKKPGASVKVSCKASGYTFTGYYMHWVRQAPGQGLEWMGWINPNSGGTNYAQKFQGRVTMTRDTSISTAYMELSRLRSDDAVYYCARLGYCSSTSCYAPYYYYGMDVWGQGTTVTVSS

SEQ ID NO: 1981 - protein, 128 aa, Artificial Sequence
  Synthetic polypeptide
EVQLVESGGGLVKPGGSLRLSCAASGFTFSSYSMNWVRQAPGKGLEWVSSISSSSSYIYYADSVKGRFTISRDNAKNSLYLQMNSLRAEDAVYYCARDLDIVVVPAAIRYYYYGMDVWGQGTTVTVSS

SEQ ID NO: 1982 - protein, 127 aa, Artificial Sequence
  Synthetic polypeptide
QVQLQQWGAGLLKPSETLSLTCAVYGGSFSGYYWSWIRQPPGKGLEWIGEINHSGSTNYNPSLKSRVTISVDTSKNQFSLKLSSVTAADAVYYCARGLVVVPAAEGDYYYYYGMDVWGQGTTVTVSS

SEQ ID NO: 1983 - protein, 128 aa, Artificial Sequence
  Synthetic polypeptide
QVQLVQSGAEVKKPGASVKVSCKASGYTFTSYGISWVRQAPGQGLEWMGWISAYNGNTNYAQKLQGRVTMTTDTSTSTAYMELRSLRSDDAVYYCARGLRVVVVAATPRYYYYGMDVWGQGTTVTVSS

SEQ ID NO: 1984 - protein, 128 aa, Artificial Sequence
  Synthetic polypeptide
QVQLVESGGGLVKPGGSLRLSCAASGFTFSDYYMSWIRQAPGKGLEWVSYISSSGSTIYYADSVKGRFTISRDNAKNSLYLQMNSLRAEDAVYYCARDLIVVVVAATPFYYYYGMDVWGQGTTVTVSS

SEQ ID NO: 1985 - protein, 127 aa, Artificial Sequence
  Synthetic polypeptide
QVQLQESGPGLVKPSETLSLTCTVSGGSISSYYWSWIRQPAGKGLEWIGRIYTSGSTNYNPSLKSRVTMSVDTSKNQFSLKLSSVTAADAVYYCARDIVVVPAAMRDYYYYYGMDVWGQGTTVTVSS

SEQ ID NO: 1986 - protein, 127 aa, Artificial Sequence
  Synthetic polypeptide
QVQLQQWGAGLLKPSETLSLTCAVYGGSFSGYYWSWIRQPPGKGLEWIGEINHSGSTNYNPSLKSRVTISVDTSKNQFSLKLSSVTAADAVYYCARGAVVVPAARRDYYYYYGMDVWGQGTTVTVSS

SEQ ID NO: 1987 - protein, 128 aa, Artificial Sequence
  Synthetic polypeptide
QVQLVQSGAEVKKPGASVKVSCKASGYTFTSYGISWVRQAPGQGLEWMGWISAYNGNTNYAQKLQGRVTMTTDTSTSTAYMELRSLRSDDAVYYCARGPVVVPAAIGVNYYYYGMDVWGQGTTVTVSS

SEQ ID NO: 1988 - protein, 128 aa, Artificial Sequence
  Synthetic polypeptide
QVQLVQSGAEVKKPGASVKVSCKASGYTFTSYGISWVRQAPGQGLEWMGWISAYNGNTNYAQKLQGRVTMTTDTSTSTAYMELRSLRSDDAVYYCARSVVVVPAAIRAYYYYYGMDVWGQGTTVTVSS

SEQ ID NO: 1989 - protein, 127 aa, Artificial Sequence
  Synthetic polypeptide
QVQLQQWGAGLLKPSETLSLTCAVYGASFSGYYWSWIRQPPGKGLEWIGEINHSGSTNYNPSLKSRVTISVDTSKNQFSLKLSSVTAADAVYYCARGHIVVVTATSNYYYYYGMDVWGQGTTVTVSS

SEQ ID NO: 1990 - protein, 128 aa, Artificial Sequence
  Synthetic polypeptide
QVQLVQSGAEVKKPGASVKVSCKASGYTFTSYGISWVRQAPGQGLEWMGWISAYNGNTNYAQKLQGRVTMTTDTSTSTAYMELRSLRSDDAVYYCARGIVVVVAATNPSYYYYGMDVWGQGTTVTVSS

SEQ ID NO: 1991 - protein, 128 aa, Artificial Sequence
  Synthetic polypeptide
QVQLVQSGAEVKKPGASVKVSCKASGYTFTSYGISWVRQAPGQGLEWTGWISAYNGNTNYAQKPQGRVTMTKDTSTSTAYMELRSLRSDDAVYYCARGANIVVVPAAISYYYYGMDVWGQGTTVTVSS

SEQ ID NO: 1992 - protein, 129 aa, Artificial Sequence
  Synthetic polypeptide
QVQLVESGGGVVQPGRSLRLSCAASGFTFSSYGMHWVRQAPGKGLEWVAVIWYDGSNKYYADSVKGRFTISRDNSKNTLYLQMNSLRAEDAVYYCARQYYYDSSGYYLGLYYYYGMDVWGQGTTVTVSS

SEQ ID NO: 1993 - protein, 129 aa, Artificial Sequence
  Synthetic polypeptide
QVQLVESGGGVVQPGRSLRLSCAASGFTFSSYAMHWVRQAPGKGLEWVAVISYDGSNKYYADSVKGRFTISRDNSKNTLYLQMNSLRAEDAVYYCARDPVITFGGVIVTDYYYYYMDVWGKGTTVTVSS

SEQ ID NO: 1994 - protein, 130 aa, Artificial Sequence
  Synthetic polypeptide
QVQLVESGGGVVQPGRSLRLSCAASGFTFSSYGMHWVRQAPGKGLEWVAVIWYDGSNKYYADSVKGRFTISRDNSKNTLYLQMNSLRAEDAVYYCARDATYYDILTGYYPQYYYYGMDVWGQGTTVTVSS

SEQ ID NO: 1995 - protein, 130 aa, Artificial Sequence
  Synthetic polypeptide
QVQLVESGGGVVQPGRSLRLSCAASGFTFSSYAMHWVRQAPGKGLEWVAVISYDGSNKYYADSVKGRFTISRDNSKNTLYLQMNSLRAEDAVYYCARDKYYYDSSGYYQDYYYYYGMDVWGQGTTVTVSS

SEQ ID NO: 1996 - protein, 130 aa, Artificial Sequence
  Synthetic polypeptide
QVQLVESGGGVVQPGRSLRLSCAASGFTFSSYGMHWVRQAPGKGLEWVAVIWYDGSNKYYADSVKGRFTISRDNSKNTLYLQMNSLRAEDAVYYCARGYYYDSSGYYYSPYYYYYGMDVWGQGTTVTVSS

SEQ ID NO: 1997 - protein, 131 aa, Artificial Sequence
  Synthetic polypeptide
QVQLVESGGGVVQPGRSLRLSCAASGFTFSSYGMHWVRQAPGKGLEWVAVIWYDGSNKYYADSVKGRFTISRDNSKNTLYLQMNSLRAEDAVYYCARGTYYYDSSGYYYPPYYYYYGMDVWGQGTTVTVSS

SEQ ID NO: 1998 - protein, 131 aa, Artificial Sequence
  Synthetic polypeptide
QVQLVESGGGVVQPGRSLRLSCAASGFTFSSYGMHWVRQAPGKGLEWVAVIWYDGSNKYYADSVKGRFTISRDNSKNTLYLQMNSLRAEDAVYYCARDFPYYYDSSGYYYGYYYYYGMDVWGQGTTVTVSS

SEQ ID NO: 1999 - protein, 15 aa, Artificial Sequence
  Synthetic peptide
CARDSGRHLGPFDIW

SEQ ID NO: 2000 - protein, 17 aa, Artificial Sequence
  Synthetic peptide
CATPYYYDGGLDAFDIW

SEQ ID NO: 2001 - protein, 14 aa, Artificial Sequence
  Synthetic peptide
CARDLSRTNWFDPW

SEQ ID NO: 2002 - protein, 14 aa, Artificial Sequence
  Synthetic peptide
CTTDLHDYGDSDYW

SEQ ID NO: 2003 - protein, 18 aa, Artificial Sequence
  Synthetic peptide
CTTDFGGMITFGGVLRRI

SEQ ID NO: 2004 - protein, 17 aa, Artificial Sequence
  Synthetic peptide
CARAQSRGGYDSFFDFW

SEQ ID NO: 2005 - protein, 13 aa, Artificial Sequence
  Synthetic peptide
CGRGGPGTGIDYW

SEQ ID NO: 2006 - protein, 14 aa, Artificial Sequence
  Synthetic peptide
CARGGQYNNWFAPW

SEQ ID NO: 2007 - protein, 14 aa, Artificial Sequence
  Synthetic peptide
CVRDLSRTNWFDPW

SEQ ID NO: 2008 - protein, 14 aa, Artificial Sequence
  Synthetic peptide
YTRDLHDYGDSDYW

SEQ ID NO: 2009 - protein, 22 aa, Artificial Sequence
  Synthetic peptide
CAKIPSFLSDYDVHPNDAIDIW

SEQ ID NO: 2010 - protein, 21 aa, Artificial Sequence
  Synthetic peptide
CARHPQGAQFSNLGTYYFDYW

SEQ ID NO: 2011 - protein, 13 aa, Artificial Sequence
  Synthetic peptide
CARDGEYGGLAMW

SEQ ID NO: 2012 - protein, 22 aa, Artificial Sequence
  Synthetic peptide
CARPGTYYDILTGYSNHGMDVW

SEQ ID NO: 2013 - protein, 18 aa, Artificial Sequence
  Synthetic peptide
CARHASFRGTNYNWFDPW

SEQ ID NO: 2014 - protein, 17 aa, Artificial Sequence
  Synthetic peptide
CARDTSTEDVAWWFDPW

SEQ ID NO: 2015 - protein, 16 aa, Artificial Sequence
  Synthetic peptide
CARDYSSGYYYYFDYW

SEQ ID NO: 2016 - protein, 20 aa, Artificial Sequence
  Synthetic peptide
CARDYDILTGYSNYYGMDVW

SEQ ID NO: 2017 - protein, 18 aa, Artificial Sequence
  Synthetic peptide
CATYYYDSSGYSYGMDVW

SEQ ID NO: 2018 - protein, 20 aa, Artificial Sequence
  Synthetic peptide
CARDPLGYCSSTSCSYFDYW

SEQ ID NO: 2019 - protein, 13 aa, Artificial Sequence
  Synthetic peptide
CARMTTVTTYDYW

SEQ ID NO: 2020 - protein, 12 aa, Artificial Sequence
  Synthetic peptide
CARDRSYYLDYW

1. A polypeptide comprising:
a CDRH1 sequence comprising or consisting of a sequence sharing 80% or greater sequence identity with a CDRH1 sequence as shown in Table 1 and/or
a CDRH2 sequence comprising or consisting of a sequence sharing 80% or greater sequence identity with a CDRH2 sequence as shown in Table 1 and/or
a CDRH3 sequence comprising or consisting of a sequence sharing 80% or greater sequence identity with a CDRH3 sequence as shown in Table 1.

2. The polypeptide according to claim 1 wherein the polypeptide comprises
a CDRH1 sequence comprising or consisting of a sequence sharing 90% or greater sequence identity with a CDRH1 sequence as shown in Table 1 and/or
a CDRH2 sequence comprising or consisting of a sequence sharing 90% or greater sequence identity with a CDRH2 sequence as shown in Table 1 and/or
a CDRH3 sequence comprising or consisting of a sequence sharing 90% or greater sequence identity with a CDRH3 sequence as shown in Table 1.

3. The polypeptide according to claim 2 wherein the polypeptide comprises
a CDRH1 sequence comprising or consisting of a CDRH1 sequence as shown in Table 1 and/or
a CDRH2 sequence comprising or consisting of a CDRH2 sequence as shown in Table 1 and/or
a CDRH3 sequence comprising or consisting of a CDRH3 sequence as shown in Table 1.

4. The polypeptide according to claim 3 wherein the polypeptide comprises
a CDRH1 sequence comprising or consisting of a CDRH1 sequence as shown in Table 1 and
a CDRH2 sequence comprising or consisting of a CDRH2 sequence as shown in Table 1 and
a CDRH3 sequence comprising or consisting of a CDRH3 sequence as shown in Table 1.

5. The polypeptide according to any preceding claim, wherein the polypeptide comprises
a FWRH1 sequence comprising or consisting of a sequence sharing 80% or greater sequence identity with a FWRH1 sequence as shown in Table 1 and/or
a FWRH2 sequence comprising or consisting of a sequence sharing 80% or greater sequence identity with a FWRH2 sequence as shown in Table 1 and/or
a FWRH3 sequence comprising or consisting of a sequence sharing 80% or greater sequence identity with a FWRH3 sequence as shown in Table 1 and/or
a FWRH4 sequence comprising or consisting of a sequence sharing 80% or greater sequence identity with a FWRH4 sequence as shown in Table 1.

6. A polypeptide comprising:
a FWRH1 sequence comprising or consisting of a sequence sharing 80% or greater sequence identity with a FWRH1 sequence as shown in Table 1 and/or
a FWRH2 sequence comprising or consisting of a sequence sharing 80% or greater sequence identity with a FWRH2 sequence as shown in Table 1 and/or
a FWRH3 sequence comprising or consisting of a sequence sharing 80% or greater sequence identity with a FWRH3 sequence as shown in Table 1 and/or
a FWRH4 sequence comprising or consisting of a sequence sharing 80% or greater sequence identity with a FWRH4 sequence as shown in Table 1.

7. The polypeptide according to either claim 5 or 6, wherein the polypeptide comprises
a FWRH1 sequence comprising or consisting of a sequence sharing 90% or greater sequence identity with a FWRH1 sequence as shown in Table 1 and/or
a FWRH2 sequence comprising or consisting of a sequence sharing 90% or greater sequence identity with a FWRH2 sequence as shown in Table 1 and/or
a FWRH3 sequence comprising or consisting of a sequence sharing 90% or greater sequence identity with a FWRH3 sequence as shown in Table 1 and/or
a FWRH4 sequence comprising or consisting of a sequence sharing 90% or greater sequence identity with a FWRH4 sequence as shown in Table 1.

8. The polypeptide according to claim 7, wherein the polypeptide comprises
a FWRH1 sequence comprising or consisting of a FWRH1 sequence as shown in Table 1 and/or
a FWRH2 sequence comprising or consisting of a FWRH2 sequence as shown in Table 1 and/or
a FWRH3 sequence comprising or consisting of a FWRH3 sequence as shown in Table 1 and/or
a FWRH4 sequence comprising or consisting of a FWRH4 sequence as shown in Table 1.

9. The polypeptide according to claim 8, wherein the polypeptide comprises
a FWRH1 sequence comprising or consisting of a FWRH1 sequence as shown in Table 1 and
a FWRH2 sequence comprising or consisting of a FWRH2 sequence as shown in Table 1 and
a FWRH3 sequence comprising or consisting of a FWRH3 sequence as shown in Table 1 and
a FWRH4 sequence comprising or consisting of a FWRH4 sequence as shown in Table 1.

10. The polypeptide according to any preceding claim, wherein the polypeptide comprises three complementarity determining regions (CDRH1-CDRH3).

11. The polypeptide according to any preceding claim, wherein the polypeptide comprises four framework regions (FWRH1-FWRH4).

12. A polypeptide comprising or consisting of a sequence sharing 80% or greater sequence identity with any immunoglobulin heavy chain variable domain (VH) sequence as shown in Table 1 or Table 2.

13. The polypeptide according to claim 12, wherein the polypeptide comprises or consists of a sequence sharing 90% or greater sequence identity with any immunoglobulin heavy chain variable domain (VH) sequence as shown in Table 1 or Table 2.

14. The polypeptide according to either claim 12 or 13 wherein the polypeptide comprises or consists of an immunoglobulin heavy chain variable domain (VH) sequence as shown in Table 1 or Table 2.

15. The polypeptide according to any preceding claim which is paired with a cognate light chain polypeptide.

16. The polypeptide according to any preceding claim wherein the polypeptide is an antibody.

17. The polypeptide according to claim 15 wherein the antibody belongs to the isotype subclass IGHA1, IGHA2, IGHG1, IGHG2, IGHG3 or IGHG4.

18. The polypeptide according to any one of claims 1 to 14 wherein the polypeptide is an antibody fragment, such as a F(ab′)₂, an Fd, an Fv, an scFv, a VH, or a VHH.

19. The polypeptide according to any preceding claim, wherein the polypeptide binds to the spike protein (S protein) of SARS-CoV-2.

20. The polypeptide according to claim 19 wherein the polypeptide binds to the S1 or S2 domain of the spike protein (S protein), such as the S1 domain of the spike protein (S1 protein).

21. Polypeptide according to any preceding claims which binds to SARS-Cov2 viral proteins other than the spike protein.

22. Polypeptide according to any preceding claims which binds to SARS-CoV2 infected human cells.

23. Polypeptide according to any preceding claim which binds to a human protein to reduce viral load, increase viral neutralisation or beneficially modify immune responses occurring as a consequence of virus infection.

24. A pharmaceutical composition comprising the polypeptide according to any preceding claim and one or more pharmaceutically acceptable diluents or carriers.

25. The pharmaceutical composition according to claim 24 further comprising up to 3 polypeptides that may bind to different epitopes, in various combination ratios according to any preceding claim.

26. The pharmaceutical composition according to either claim 24 or 25 comprising at least one further active agent such as an anti-viral or anti-inflammatory agent.

27. The polypeptide or pharmaceutical composition according to any preceding claims, for use in suppressing or treating a disease or disorder mediated by infection of SARS-CoV-2, such as COVID-19, or for providing prophylaxis to a subject at risk of infection of SARS-CoV-2, such as COVID-19.

28. A method of suppressing or treating a disease or disorder mediated by infection of SARS-CoV-2, such as COVID-19 or for providing prophylaxis to a subject at risk of infection of SARS-CoV-2, such as COVID-19, comprising administering to a person in need thereof a therapeutically effective amount of the polypeptide or pharmaceutical composition according to any preceding claims.

29. A polypeptide or pharmaceutical composition according to any preceding claims, for providing treatment or prophylaxis of an infection mediated by other/new forms of coronavirus.

30. One or more polypeptides according to any preceding claims, for use in diagnosis and/or prediction of outcome of SARS-CoV-2 infection.

31. A polypeptide or pharmaceutical composition according to any preceding claims, for use in medical equipment in order to prevent or reduce the risk of infection (e.g., mask or air filter).

32. A polynucleotide encoding the polypeptide according to any one of claims 1 to 23.

33. A vector comprising the polynucleotide according to claim 32.
